(19) United States
(12) Patent Application Publication
(10) Pub. No.: US 2004/0053250 A1
(43) Pub. Date: Mar. 18, 2004

(54) Novel arginine-rich protein-like nucleic acids and polypeptides

(76) Inventors: Y. Tom Tang, San Jose, CA (US); Aidong Xue, Sunnyvale, CA (US); Radoje T. Drmanac, Palo Alto, CA (US)

Correspondence Address: Luisa Bigornia, HYSEQ, INC., 670 Almanor Avenue, Sunnyvale, CA, 94085, US

(21) Appl. No.: 10/302,172

(22) Filed: Nov. 21, 2002

Related U.S. Application Data
(63) Continuation-in-part of application No. 10/225,251, filed on Aug. 20, 2002.
Application No. 10/225,251 is a continuation of application No. 09/799,451, filed on Mar. 5, 2001.
Application No. 10/225,251 is a continuation of application No. PCT/US02/05095, filed on Mar. 5, 2002.
Application No. PCT/US02/05095 is a continuation-in-part of application No. 09/799,451, filed on Mar. 5, 2001.

(51) Int. Cl. C12Q 1/68; C07H 21/04; C12P 21/02; C12N 5/06; C07K 14/47

(52) U.S. Cl. 435/6; 435/69.1; 435/320.1; 435/325; 530/350; 536/23.5

(57) ABSTRACT

The present invention provides novel nucleic acids, novel polypeptide sequences encoded by these nucleic acids and uses thereof.

[0001] This application is a continuation-in-part application of U.S. application Ser. No. 10/225,251, filed Aug. 20, 2002 entitled “Novel Nucleic Acids and Polypeptides,” Attorney Docket No. 803_{—}1CN, which is a continuation application of U.S. application Ser. No. 09/799,451, filed Mar. 5, 2001 entitled “Novel Nucleic Acids and Polypeptides,” Attorney Docket No. 803; and PCT Application Serial No. PCT/US/02/05095, filed Mar. 5, 2002 entitled “Novel Nucleic Acids and Polypeptides,” Attorney Docket No. 803CIP/PCT, which is a continuation-in-part application of U.S. application Ser. No. 09/799,451, Attorney Docket No. 803, all of which are herein incorporated by reference in their entirety.

### 1. BACKGROUND OF THE INVENTION

[0002] 1.1 Technical Field

[0003] The present invention provides novel polynucleotides and polypeptides encoded by such polynucleotides, along with uses for these polynucleotides and polypeptides, for example in therapeutic, diagnostic and research methods.

[0004] 1.2 Background

[0005] Technology aimed at the discovery of protein factors (including e.g., cytokines, such as lymphokines, interferons, CSFs, chemokines, and interleukins) has matured rapidly over the past decade. The now routine hybridization cloning and expression cloning techniques clone novel polynucleotides “directly” in the sense that they rely on information directly related to the discovered protein (i.e., partial DNA/amino acid sequence of the protein in the case of hybridization cloning; activity of the protein in the case of expression cloning). More recent “indirect” cloning techniques such as signal sequence cloning, which isolates DNA sequences based on the presence of a now well-recognized secretory leader sequence motif, as well as various PCR-based or low stringency hybridization-based cloning techniques, have advanced the state of the art by making available large numbers of DNA/amino acid sequences for proteins that are known to have biological activity, for example, by virtue of their secreted nature in the case of leader sequence cloning, by virtue of their cell or tissue source in the case of PCR-based techniques, or by virtue of structural similarity to other genes of known biological activity.

[0006] Identified polynucleotide and polypeptide sequences have numerous applications in, for example, diagnostics, forensics, gene mapping, identification of mutations responsible for genetic disorders or other traits, to assess biodiversity, and to produce many other types of data and products dependent on DNA and amino acid sequences.

[0007] Proteins are known to have biological activity, for example, by virtue of their secreted nature in the case of leader sequence cloning, by virtue of their cell or tissue source in the case of PCR-based techniques, or by virtue of structural similarity to other genes of known biological activity. It is to these polypeptides and the polynucleotides encoding them that the present invention is directed. In particular, this invention is directed to novel arginine-rich protein (ARP)-like polynucleotides and polypeptides.

[0008] Carcinogenesis develops from a progressive accumulation of genetic changes in oncogenes and tumor suppressor genes (Bishop, Cell 64:235-248 (1991) herein incorporated by reference). Identification of these changes is a major goal of cancer research and can lead to diagnostic tools for early detection and therapeutic methods. Both alleles of a tumor suppressor must be lost or inactivated to lead to carcinogenesis; however only one allele of an oncogene need be activated (i.e. gain of function) to be carcinogenic (Marshall, Cell 64:313-326 (1991); Nishimura and Sekiya, Biochem. J. 243:313-327 (1987); Varmus, Annu. Rev. Genet. 18:553-612 (1984); Alitalo and Schwab, Adv. Cancer Res. 47:235-281 (1986), all of which are herein incorporated by reference). ARP is located on the 3p21.1 chromosomal band which has a specific mutation (ATG to AGG) or deletion of codon 50 in many different tumor types, including squamous head and neck cancer, pancreatic adenocarcinoma, lung, breast, prostate and renal cell carcinomas (Shridar et al., Cancer Res. 56:5576-5578 (1996); Shridar et al., Oncogene 12:1931-1939 (1996); Shridhar et al., Oncogene 14:2213-2216 (1997), all of which are herein incorporated by reference). This mutation acts as a gain of function mutation and may be causal in tumorigenesis since it is found in so many types of tumors. Thus, there exists a need for identifying further members of this protein since they can be used in cancer diagnosis and therapy.

### 2. SUMMARY OF THE INVENTION

[0009] This invention is based on the discovery of a novel arginine-rich protein (ARP)-like polynucleotide and polypeptide. The compositions of the present invention include novel isolated polypeptides, novel isolated polynucleotides encoding such polypeptides, including recombinant DNA molecules, cloned genes or degenerate variants thereof, especially naturally occurring variants such as allelic variants, antisense polynucleotide molecules, and antibodies that specifically recognize one or more epitopes present on such polypeptides, as well as hybridomas producing such antibodies.

[0010] The compositions of the present invention additionally include vectors, including expression vectors, containing the polynucleotides of the invention, cells genetically engineered to contain such polynucleotides and cells genetically engineered to express such polynucleotides.

[0011] The present invention relates to a collection or library of at least one novel nucleic acid sequence assembled from expressed sequence tags (ESTs) isolated mainly by sequencing by hybridization (SBH), and in some cases, sequences obtained from one or more public databases. The invention relates also to the proteins encoded by such polynucleotides, along with therapeutic, diagnostic and research utilities for these polynucleotides and proteins. The nucleic acid sequence is designated as SEQ ID NO: 796 and is provided in the Sequence Listing. In the nucleic acids provided in the Sequence Listing, A is adenine; C is cytosine; G is guanine; T is thymine; and N is any of the four bases. In the amino acids provided in the Sequence Listing, * corresponds to the stop codon.

[0012] The nucleic acid sequences of the present invention also include, nucleic acid sequences that hybridize to the complement of SEQ ID NO: 796 under stringent hybridization conditions; nucleic acid sequences which are allelic variants or species homologues of any of the nucleic acid sequences recited above, or nucleic acid sequences that encode a peptide comprising a specific domain or truncation of the peptides encoded by SEQ ID NO: 796. A polynucleotide comprising a nucleotide sequence having at least 90% identity to an identifying sequence of SEQ ID NO: 796 or a degenerate variant or fragment thereof. The identifying sequence can be 100 base pairs in length.

[0013] The nucleic acid sequences of the present invention also include the sequence information from the nucleic acid sequence of SEQ ID NO: 796. The sequence information can be a segment of SEQ ID NO: 796 that uniquely identifies or represents the sequence information of SEQ ID NO: 796.

[0014] A collection as used in this application can be a collection of only one polynucleotide. The collection of sequence information or identifying information of each sequence can be provided on a nucleic acid array. In one embodiment, segments of sequence information are provided on a nucleic acid array to detect the polynucleotide that contains the segment. The array can be designed to detect full-match or mismatch to the polynucleotide that contains the segment. The collection can also be provided in a computer-readable format.

[0015] This invention also includes the reverse or direct complement of any of the nucleic acid sequences recited above; cloning or expression vectors containing the nucleic acid sequences; and host cells or organisms transformed with these expression vectors. Nucleic acid sequences (or their reverse or direct complements) according to the invention have numerous applications in a variety of techniques known to those skilled in the art of molecular biology, such as use as hybridization probes, use as primers for PCR, use in an array, use in computer-readable media, use in sequencing full-length genes, use for chromosome and gene mapping, use in the recombinant production of protein, and use in the generation of anti-sense DNA or RNA, their chemical analogs and the like.

[0016] In a preferred embodiment, the nucleic acid sequence of SEQ ID NO: 796 or novel segments or parts of the nucleic acids of the invention are used as primers in expression assays that are well known in the art. In a particularly preferred embodiment, the nucleic acid sequence of SEQ ID NO: 796 or novel segments or parts of the nucleic acids provided herein are used in diagnostics for identifying expressed genes or, as well known in the art and exemplified by Vollrath et al., Science 258:52-59 (1992), as expressed sequence tags for physical mapping of the human genome.

[0017] The isolated polynucleotides of the invention include, but are not limited to, a polynucleotide comprising the nucleotide sequence set forth in SEQ ID NO: 796; a polynucleotide comprising the full length protein coding sequence of SEQ ID NO: 796; and a polynucleotide comprising the nucleotide sequence of the mature protein coding sequence of SEQ ID NO: 796. The polynucleotides of the present invention also include, but are not limited to, a polynucleotide that hybridizes under stringent hybridization conditions to (a) the complement of the nucleotide sequences set forth in SEQ ID NO: 796; (b) a nucleotide sequence encoding the amino acid sequence of SEQ ID NO: 949 set forth in the Sequence Listing; (c) a polynucleotide which is an allelic variant of any polynucleotides recited above; (d) a polynucleotide which encodes a species homolog (e.g. orthologs) the protein recited above; or (e) a polynucleotide that encodes a polypeptide comprising a specific domain or truncation of the polypeptide comprising an amino acid sequence of SEQ ID NO: 949 set forth in the Sequence Listing.

[0018] The isolated polypeptides of the invention include, but are not limited to, a polypeptide comprising the amino acid sequences set forth in SEQ ID NO: 949; or the corresponding full length or mature protein. Polypeptides of the invention also include polypeptides with biological activity that are encoded by (a) polynucleotides having a nucleotide sequence set forth in SEQ ID NO: 796; or (b) polynucleotides that hybridize to the complement of the polynucleotides of (a) under stringent hybridization conditions. Biologically or immunologically active variants of any of the polypeptide sequences in the Sequence Listing, and “substantial equivalents” thereof (e.g., with at least about 65%, 70%, 75%, 80%, 85%, 90%, 95%, 98% or 99% amino acid sequence identity) that preferably retain biological activity are also contemplated. The polypeptides of the invention may be wholly or partially chemically synthesized but are preferably produced by recombinant means using the genetically engineered cells (e.g. host cells) of the invention.

[0019] The invention also provides compositions comprising a polypeptide of the invention. Polypeptide compositions of the invention may further comprise an acceptable carrier, such as a hydrophilic, e.g., pharmaceutically acceptable, carrier.

[0020] The invention also provides host cells transformed or transfected with a polynucleotide of the invention.

[0021] The invention also relates to methods for producing a polypeptide of the invention comprising growing a culture of the host cells of the invention in a suitable culture medium under conditions permitting expression of the desired polypeptide, and purifying the polypeptide from the culture or from the host cells. Preferred embodiments include those in which the protein produced by such process is a mature form of the protein.

[0022] Polynucleotides according to the invention have numerous applications in a variety of techniques known to those skilled in the art of molecular biology. These techniques include use as hybridization probes, use as oligomers, or primers, for PCR, use for chromosome and gene mapping, use in the recombinant production of protein, and use in generation of anti-sense DNA or RNA, their chemical analogs and the like. For example, when the expression of an mRNA is largely restricted to a particular cell or tissue type, polynucleotides of the invention can be used as hybridization probes to detect the presence of the particular cell or tissue mRNA in a sample using, e.g., in situ hybridization.

[0023] In other exemplary embodiments, the polynucleotides are used in diagnostics as expressed sequence tags for identifying expressed genes or, as well known in the art and exemplified by Vollrath et al., Science 258:52-59 (1992), as expressed sequence tags for physical mapping of the human genome.

[0024] The polypeptides according to the invention can be used in a variety of conventional procedures and methods that are currently applied to other proteins. For example, a polypeptide of the invention can be used to generate an antibody that specifically binds the polypeptide. Such antibodies, particularly monoclonal antibodies, are useful for detecting or quantitating the polypeptide in tissue. The polypeptides of the invention can also be used as molecular weight markers, and as a food supplement.

[0025] Methods are also provided for preventing, treating, or ameliorating a medical condition which comprises the step of administering to a mammalian subject a therapeutically effective amount of a composition comprising a polypeptide of the present invention and a pharmaceutically acceptable carrier.

[0026] In particular, the polypeptides and polynucleotides of the invention can be utilized, for example, in methods for the prevention and/or treatment of disorders involving aberrant protein expression or biological activity.

[0027] The present invention further relates to methods for detecting the presence of the polynucleotides or polypeptides of the invention in a sample. Such methods can, for example, be utilized as part of prognostic and diagnostic evaluation of disorders as recited herein and for the identification of subjects exhibiting a predisposition to such conditions. The invention provides a method for detecting the polynucleotides of the invention in a sample, comprising contacting the sample with a compound that binds to and forms a complex with the polynucleotide of interest for a period sufficient to form the complex and under conditions sufficient to form a complex and detecting the complex such that if a complex is detected, the polynucleotide of interest is detected. The invention also provides a method for detecting the polypeptides of the invention in a sample comprising contacting the sample with a compound that binds to and forms a complex with the polypeptide under conditions and for a period sufficient to form the complex and detecting the formation of the complex such that if a complex is formed, the polypeptide is detected.

[0028] The invention also provides kits comprising polynucleotide probes and/or monoclonal antibodies, and optionally quantitative standards, for carrying out methods of the invention. Furthermore, the invention provides methods for evaluating the efficacy of drugs, and monitoring the progress of patients, involved in clinical trials for the treatment of disorders as recited above.

[0029] The invention also provides methods for the identification of compounds that modulate (i.e., increase or decrease) the expression or activity of the polynucleotides and/or polypeptides of the invention. Such methods can be utilized, for example, for the identification of compounds that can ameliorate symptoms of disorders as recited herein. Such methods can include, but are not limited to, assays for identifying compounds and other substances that interact with (e.g., bind to) the polypeptides of the invention. The invention provides a method for identifying a compound that binds to the polypeptides of the invention comprising contacting the compound with a polypeptide of the invention in a cell for a time sufficient to form a polypeptide/compound complex, wherein the complex drives expression of a reporter gene sequence in the cell; and detecting the complex by detecting the reporter gene sequence expression such that if expression of the reporter gene is detected the compound the binds to a polypeptide of the invention is identified.

[0030] The methods of the invention also provide methods for treatment which involve the administration of the polynucleotides or polypeptides of the invention to individuals exhibiting symptoms or tendencies. In addition, the invention encompasses methods for treating diseases or disorders as recited herein comprising administering compounds and other substances that modulate the overall activity of the target gene products. Compounds and other substances can effect such modulation either on the level of target gene/protein expression or target protein activity.

[0031] The polypeptides of the present invention and the polynucleotides encoding them are also useful for the same functions known to one of skill in the art as the polypeptides and polynucleotides to which they have homology (set forth in Table 2); for which they have a signature region (as set forth in Table 3); or for which they have homology to a gene. If no homology is set forth for a sequence, then the polypeptides and polynucleotides of the present invention are useful for a variety of applications, as described herein, including use in arrays for detection.

### 3. BRIEF DESCRIPTION OF THE DRAWINGS

[0032] FIG. 1 shows a BLASTP amino acid alignment between the protein derived from SEQ ID NO: 796 (i.e. SEQ ID NO: 949) and human arginine-rich protein (ARP) (SEQ ID NO: 950), indicating that the two sequences share 64% identity and 78% similarity over 147 amino acid residues of SEQ ID NO: 949, wherein A=Alanine, C=Cysteine, D=Aspartic Acid, E=Glutamic Acid, F=Phenylalanine, G=Glycine, H=Histidine, I=Isoleucine, K=Lysine, L=Leucine, M=Methionine, N=Asparagine, P=Proline, Q=Glutamine, R=Arginine, S=Serine, T=Threonine, V=Valine, W=Tryptophan, Y=Tyrosine. Gaps are presented as dashes.

### 4. DETAILED DESCRIPTION OF THE INVENTION

[0033] The arginine-rich protein (ARP)-like polypeptide encoded by SEQ ID NO: 796 is an approximately 188 amino acid protein with a predicted molecular mass of approximately 21 kDa unglycosylated. The initial methionine starts at position 40 of SEQ ID NO: 949 and the putative stop codon begins at position 601 of SEQ ID NO: 949. A signal peptide of 26 residues is predicted from approximately residue 1 to residue 26 of SEQ ID NO: 949. The extracellular portion is useful on its own. This can be confirmed by expression in mammalian cells and sequencing of the cleaved product. The signal peptide region was predicted using the Neural Network SignalP V1.1 program (Nielsen et al., Int. J. Neural Syst. 8:581-599 (1997)). One of skill in the art will recognize that the actual cleavage site may be different than that predicted by the computer program.

[0034] Human ARP has been shown to be associated with a variety of cancers including squamous head and neck cancer, pancreatic adenocarcinoma, lung, breast, prostate and renal cell carcinomas (Shridar et al., Cancer Res. 56:5576-5578 (1996); Shridar et al., Oncogene 12:1931-1939 (1996); Shridhar et al., Oncogene 14:2213-2216 (1997), all of which are herein incorporated by reference). These cancers are associated with a deletion of mutation of codon 50 (ATG to AGG) resulting in a gain of function which may in fact be causal in tumorigenesis. The polypeptide of SEQ ID NO: 949 is expected to have a similar function in that it acts as a tumor suppressor, and can induce tumor formation when activated. The polypeptides, polynucleotides, antibodies, and other compositions of the invention are expected to be useful in diagnosing and treating a variety of cancers, including but not limited to squamous head and neck cancer, pancreatic adenocarcinoma, lung, breast, prostate and renal cell carcinomas.

[0035] 4.1 Definitions

[0036] It must be noted that as used herein and in the appended claims, the singular forms “a”, “an” and “the” include plural references unless the context clearly dictates otherwise.

[0037] The term “active” refers to those forms of the polypeptide which retain the biologic and/or immunologic activities of any naturally occurring polypeptide. According to the invention, the terms “biologically active” or “biological activity” refer to a protein or peptide having structural, regulatory or biochemical functions of a naturally occurring molecule. Likewise “immunologically active” or “immunological activity” refers to the capability of the natural, recombinant or synthetic ARP-like polypeptide to induce a specific immune response in appropriate animals or cells and to bind with specific antibodies. The term “ARP-like biological activity” refers to biological activity that is similar to the biological activity of an ARP-like polypeptide.

[0038] The term “activated cells” as used in this application, are those cells which are engaged in extracellular or intracellular membrane trafficking, including the export of secretory or enzymatic molecules as part of a normal or disease process.

[0039] The terms “complementary” or “complementarity” refer to the natural binding of polynucleotides by base pairing. For example, the sequence 5′-AGT-3′ binds to the complementary sequence 3′-TCA-5′. Complementarity between two single-stranded molecules may be “partial” such that only some of the nucleic acids bind or it may be “complete” such that total complementarity exists between the single stranded molecules. The degree of complementarity between the nucleic acid strands has significant effects on the efficiency and strength of the hybridization between the nucleic acid strands.

[0040] The term “embryonic stem cells (ES)” refers to a cell that can give rise to many differentiated cell types in an embryo or an adult, including the germ cells. The term “germ line stem cells (GSCs)” refers to stem cells derived from primordial stem cells that provide a steady and continuous source of germ cells for the production of gametes. The term “primordial germ cells (PGCs)” refers to a small population of cells set aside from other cell lineages particularly from the yolk sac, mesenteries, or gonadal ridges during embryogenesis that have the potential to differentiate into germ cells and other cells. PGCs are the source from which GSCs and ES cells are derived. The PGCs, the GSCs and the ES cells are capable of self-renewal. Thus these cells not only populate the germ line and give rise to a plurality of terminally differentiated cells that comprise the adult specialized organs, but are able to regenerate themselves.

[0041] The term “expression modulating fragment,” EMF, means a series of nucleotides which modulates the expression of an operably linked ORF or another EMF.

[0042] As used herein, a sequence is said to “modulate the expression of an operably linked sequence” when the expression of the sequence is altered by the presence of the EMF. EMFs include, but are not limited to, promoters, and promoter modulating sequences (inducible elements). One class of EMFs is nucleic acid fragments which induce the expression of an operably linked ORF in response to a specific regulatory factor or physiological event.

[0043] The terms “nucleotide sequence” or “nucleic acid” or “polynucleotide” or “oligonculeotide” are used interchangeably and refer to a heteropolymer of nucleotides or the sequence of these nucleotides. These phrases also refer to DNA or RNA of genomic or synthetic origin which may be single-stranded or double-stranded and may represent the sense or the antisense strand, to peptide nucleic acid (PNA) or to any DNA-like or RNA-like material. In the sequences herein A is adenine, C is cytosine, T is thymine, G is guanine and N is A, C, G or T (U). It is contemplated that where the polynucleotide is RNA, the T (thymine) in the sequences provided herein is substituted with U (uracil). Generally, nucleic acid segments provided by this invention may be assembled from fragments of the genome and short oligonucleotide linkers, or from a series of oligonucleotides, or from individual nucleotides, to provide a synthetic nucleic acid which is capable of being expressed in a recombinant transcriptional unit comprising regulatory elements derived from a microbial or viral operon, or a eukaryotic gene.

[0044] The terms “oligonucleotide fragment” or a “polynucleotide fragment”, “portion,” or “segment” or “probe” or “primer” are used interchangeably and refer to a sequence of nucleotide residues which are at least about 5 nucleotides, more preferably at least about 7 nucleotides, more preferably at least about 9 nucleotides, more preferably at least about 11 nucleotides and most preferably at least about 17 nucleotides. The fragment is preferably less than about 500 nucleotides, preferably less than about 200 nucleotides, more preferably less than about 100 nucleotides, more preferably less than about 50 nucleotides and most preferably less than 30 nucleotides. Preferably the probe is from about 6 nucleotides to about 200 nucleotides, preferably from about 15 to about 50 nucleotides, more preferably from about 17 to 30 nucleotides and most preferably from about 20 to 25 nucleotides. Preferably the fragments can be used in polymerase chain reaction (PCR), various hybridization procedures or microarray procedures to identify or amplify identical or related parts of mRNA or DNA molecules. A fragment or segment may uniquely identify each polynucleotide sequence of the present invention. Preferably the fragment comprises a sequence substantially similar to a portion of SEQ ID NO: 796.

[0045] Probes may, for example, be used to determine whether specific mRNA molecules are present in a cell or tissue or to isolate similar nucleic acid sequences from chromosomal DNA as described by Walsh et al. (Walsh, P. S. et al., PCR Methods Appl 1:241-250 (1992)). They may be labeled by nick translation, Klenow fill-in reaction, PCR, or other methods well known in the art. Probes of the present invention, their preparation and/or labeling are elaborated in Sambrook, J. et al., 1989, Molecular Cloning: A Laboratory Manual, Cold Spring Harbor Laboratory, NY; or Ausubel, F. M. et al., 1989, Current Protocols in Molecular Biology, John Wiley & Sons, New York N.Y., both of which are incorporated herein by reference in their entirety.

[0046] The nucleic acid sequences of the present invention also include the sequence information from the nucleic acid sequence of SEQ ID NO: 796. The sequence information can be a segment of SEQ ID NO: 796 that uniquely identifies or represents the sequence information of that sequence of SEQ ID NO: 796. One such segment can be a twenty-mer nucleic acid sequence because the probability that a twenty-mer is fully matched in the human genome is 1 in 300. In the human genome, there are three billion base pairs in one set of chromosomes. Because 4²⁰ possible twenty-mers exist, there are 300 times more twenty-mers than there are base pairs in a set of human chromosomes. Using the same analysis, the probability for a seventeen-mer to be fully matched in the human genome is approximately 1 in 5. When these segments are used in arrays for expression studies, fifteen-mer segments can be used. The probability that the fifteen-mer is fully matched in the expressed sequences is also approximately one in five because expressed sequences comprise less than approximately 5% of the entire genome sequence.

[0047] Similarly, when using sequence information for detecting a single mismatch, a segment can be a twenty-five mer. The probability that the twenty-five mer would appear in a human genome with a single mismatch is calculated by multiplying the probability for a full match (1÷4²⁵) times the increased probability for mismatch at each nucleotide position (3×25). The probability that an eighteen mer with a single mismatch can be detected in an array for expression studies is approximately one in five. The probability that a twenty-mer with a single mismatch can be detected in a human genome is approximately one in five.

[0048] The term “open reading frame,” ORF, means a series of nucleotide triplets coding for amino acids without any termination codons and is a sequence translatable into protein.

[0049] The terms “operably linked” or “operably associated” refer to functionally related nucleic acid sequences. For example, a promoter is operably associated or operably linked with a coding sequence if the promoter controls the transcription of the coding sequence. While operably linked nucleic acid sequences can be contiguous and in the same reading frame, certain genetic elements e.g. repressor genes are not contiguously linked to the coding sequence but still control transcription/translation of the coding sequence.

[0050] The term “pluripotent” refers to the capability of a cell to differentiate into a number of differentiated cell types that are present in an adult organism. A pluripotent cell is restricted in its differentiation capability in comparison to a totipotent cell.

[0051] The terms “polypeptide” or “peptide” or “amino acid sequence” refer to an oligopeptide, peptide, polypeptide, or protein sequence or fragment thereof and to naturally occurring or synthetic molecules. A polypeptide “fragment,” “portion,” or “segment” is a stretch of amino acid residues of at least about 5 amino acids, preferably at least about 7 amino acids, more preferably at least about 9 amino acids and most preferably at least about 17 or more amino acids. The peptide preferably is not greater than about 200 amino acids, more preferably less than 150 amino acids and most preferably less than 100 amino acids. Preferably the peptide is from about 5 to about 200 amino acids. To be active, any polypeptide must have sufficient length to display biological and/or immunological activity.

[0052] The term “naturally occurring polypeptide” refers to polypeptides produced by cells that have not been genetically engineered and specifically contemplates various polypeptides arising from post-translational modifications of the polypeptide including, but not limited to, acetylation, carboxylation, glycosylation, phosphorylation, lipidation and acylation.

[0053] The term “translated protein coding portion” means a sequence which encodes for the full length protein which may include any leader sequence or any processing sequence.

[0054] The term “mature protein coding sequence” means a sequence which encodes a peptide or protein without a signal or leader sequence. The “mature protein portion” means that portion of the protein which does not include a signal or leader sequence. The peptide may have been produced by processing in the cell which removes any leader/signal sequence. The mature protein portion may or may not include the initial methionine residue. The methionine residue may be removed from the protein during processing in the cell. The peptide may be produced synthetically or the protein may have been produced using a polynucleotide only encoding for the mature protein coding sequence.

[0055] The term “derivative” refers to polypeptides chemically modified by such techniques as ubiquitination, labeling (e.g., with radionuclides or various enzymes), covalent polymer attachment such as pegylation (derivatization with polyethylene glycol) and insertion or substitution by chemical synthesis of amino acids such as ornithine, which do not normally occur in human proteins.

[0056] The term “variant” (or “analog”) refers to any polypeptide differing from naturally occurring polypeptides by amino acid insertions, deletions, and substitutions, created using, e g., recombinant DNA techniques. Guidance in determining which amino acid residues may be replaced, added or deleted without abolishing activities of interest, may be found by comparing the sequence of the particular polypeptide with that of homologous peptides and minimizing the number of amino acid sequence changes made in regions of high homology (conserved regions) or by replacing amino acids with consensus sequence.

[0057] Alternatively, recombinant variants encoding these same or similar polypeptides may be synthesized or selected by making use of the “redundancy” in the genetic code. Various codon substitutions, such as the silent changes which produce various restriction sites, may be introduced to optimize cloning into a plasmid or viral vector or expression in a particular prokaryotic or eukaryotic system. Mutations in the polynucleotide sequence may be reflected in the polypeptide or domains of other peptides added to the polypeptide to modify the properties of any part of the polypeptide, to change characteristics such as ligand-binding affinities, interchain affinities, or degradation/turnover rate.

[0058] Preferably, amino acid “substitutions” are the result of replacing one amino acid with another amino acid having similar structural and/or chemical properties, i.e., conservative amino acid replacements. “Conservative” amino acid substitutions may be made on the basis of similarity in polarity, charge, solubility, hydrophobicity, hydrophilicity, and/or the amphipathic nature of the residues involved. For example, nonpolar (hydrophobic) amino acids include alanine, leucine, isoleucine, valine, proline, phenylalanine, tryptophan, and methionine; polar neutral amino acids include glycine, serine, threonine, cysteine, tyrosine, asparagine, and glutamine; positively charged (basic) amino acids include arginine, lysine, and histidine; and negatively charged (acidic) amino acids include aspartic acid and glutamic acid. “Insertions” or “deletions” are preferably in the range of about 1 to 20 amino acids, more preferably 1 to 10 amino acids. The variation allowed may be experimentally determined by systematically making insertions, deletions, or substitutions of amino acids in a polypeptide molecule using recombinant DNA techniques and assaying the resulting recombinant variants for activity.

[0059] Alternatively, where alteration of function is desired, insertions, deletions or non-conservative alterations can be engineered to produce altered polypeptides. Such alterations can, for example, alter one or more of the biological functions or biochemical characteristics of the polypeptides of the invention. For example, such alterations may change polypeptide characteristics such as ligand-binding affinities, interchain affinities, or degradation/turnover rate. Further, such alterations can be selected so as to generate polypeptides that are better suited for expression, scale up and the like in the host cells chosen for expression. For example, cysteine residues can be deleted or substituted with another amino acid residue in order to eliminate disulfide bridges.

[0060] The terms “purified” or “substantially purified” as used herein denotes that the indicated nucleic acid or polypeptide is present in the substantial absence of other biological macromolecules, e.g., polynucleotides, proteins, and the like. In one embodiment, the polynucleotide or polypeptide is purified such that it constitutes at least 95% by weight, more preferably at least 99% by weight, of the indicated biological macromolecules present (but water, buffers, and other small molecules, especially molecules having a molecular weight of less than 1000 daltons, can be present).

[0061] The term “isolated” as used herein refers to a nucleic acid or polypeptide separated from at least one other component (e.g., nucleic acid or polypeptide) present with the nucleic acid or polypeptide in its natural source. In one embodiment, the nucleic acid or polypeptide is found in the presence of (if anything) only a solvent, buffer, ion, or other component normally present in a solution of the same. The terms “isolated” and “purified” do not encompass nucleic acids or polypeptides present in their natural source.

[0062] The term “recombinant,” when used herein to refer to a polypeptide or protein, means that a polypeptide or protein is derived from recombinant (e.g., microbial, insect, or mammalian) expression systems. “Microbial” refers to recombinant polypeptides or proteins made in bacterial or fungal (e.g., yeast) expression systems. As a product, “recombinant microbial” defines a polypeptide or protein essentially free of native endogenous substances and unaccompanied by associated native glycosylation. Polypeptides or proteins expressed in most bacterial cultures, e.g., E. coli, will be free of glycosylation modifications; polypeptides or proteins expressed in yeast will have a glycosylation pattern in general different from those expressed in mammalian cells.

[0063] The term “recombinant expression vehicle or vector” refers to a plasmid or phage or virus or vector, for expressing a polypeptide from a DNA (RNA) sequence. An expression vehicle can comprise a transcriptional unit comprising an assembly of (1) a genetic element or elements having a regulatory role in gene expression, for example, promoters or enhancers, (2) a structural or coding sequence which is transcribed into mRNA and translated into protein, and (3) appropriate transcription initiation and termination sequences. Structural units intended for use in yeast or eukaryotic expression systems preferably include a leader sequence enabling extracellular secretion of translated protein by a host cell. Alternatively, where recombinant protein is expressed without a leader or transport sequence, it may include an amino terminal methionine residue. This residue may or may not be subsequently cleaved from the expressed recombinant protein to provide a final product.

[0064] The term “recombinant expression system” means host cells which have stably integrated a recombinant transcriptional unit into chromosomal DNA or carry the recombinant transcriptional unit extrachromosomally. Recombinant expression systems as defined herein will express heterologous polypeptides or proteins upon induction of the regulatory elements linked to the DNA segment or synthetic gene to be expressed. This term also means host cells which have stably integrated a recombinant genetic element or elements having a regulatory role in gene expression, for example, promoters or enhancers. Recombinant expression systems as defined herein will express polypeptides or proteins endogenous to the cell upon induction of the regulatory elements linked to the endogenous DNA segment or gene to be expressed. The cells can be prokaryotic or eukaryotic.

[0065] The term “secreted” includes a protein that is transported across or through a membrane, including transport as a result of signal sequences in its amino acid sequence when it is expressed in a suitable host cell. “Secreted” proteins include without limitation proteins secreted wholly (e.g., soluble proteins) or partially (e.g., receptors) from the cell in which they are expressed. “Secreted” proteins also include without limitation proteins that are transported across the membrane of the endoplasmic reticulum. “Secreted” proteins are also intended to include proteins containing non-typical signal sequences (e.g. Interleukin-1 Beta, see Krasney, P. A. and Young, P. R. Cytokine 4:134-143 (1992)) and factors released from damaged cells (e.g. Interleukin-1 Receptor Antagonist, see Arend, W. P. et. al. Annu. Rev. Immunol. 16:27-55 (1998)).

[0066] Where desired, an expression vector may be designed to contain a “signal or leader sequence” which will direct the polypeptide through the membrane of a cell. Such a sequence may be naturally present on the polypeptides of the present invention or provided from heterologous protein sources by recombinant DNA techniques.

[0067] The term “stringent” is used to refer to conditions that are commonly understood in the art as stringent. Stringent conditions can include highly stringent conditions (i.e., hybridization to filter-bound DNA in 0.5 M NaHPO₄, 7% sodium dodecyl sulfate (SDS), 1 mM EDTA at 65° C., and washing in 0.1×SSC/0.1% SDS at 68° C.), and moderately stringent conditions (i.e., washing in 0.2×SSC/0.1% SDS at 42° C.). Other exemplary hybridization conditions are described herein in the examples.

[0068] In instances of hybridization of deoxyoligonucleotides, additional exemplary stringent hybridization conditions include washing in 6×SSC/0.05% sodium pyrophosphate at 37° C. (for 14-base oligonucleotides), 48° C. (for 17-base oligos), 55° C. (for 20-base oligonucleotides), and 60° C. (for 23-base oligonucleotides).

[0069] As used herein, “substantially equivalent” or “substantially similar” can refer both to nucleotide and amino acid sequences, for example a mutant sequence, that varies from a reference sequence by one or more substitutions, deletions, or additions, the net effect of which does not result in an adverse functional dissimilarity between the reference and subject sequences. Typically, such a substantially equivalent sequence varies from one of those listed herein by no more than about 35% (i.e., the number of individual residue substitutions, additions, and/or deletions in a substantially equivalent sequence, as compared to the corresponding reference sequence, divided by the total number of residues in the substantially equivalent sequence is about 0.35 or less). Such a sequence is said to have 65% sequence identity to the listed sequence. In one embodiment, a substantially equivalent, e.g., mutant, sequence of the invention varies from a listed sequence by no more than 30% (70% sequence identity); in a variation of this embodiment, by no more than 25% (75% sequence identity); and in a further variation of this embodiment, by no more than 20% (80% sequence identity) and in a further variation of this embodiment, by no more than 10% (90% sequence identity) and in a further variation of this embodiment, by no more that 5% (95% sequence identity). Substantially equivalent, e.g., mutant, amino acid sequences according to the invention preferably have at least 80% sequence identity with a listed amino acid sequence, more preferably at least 85% sequence identity, more preferably at least 90% sequence identity, more preferably at least 95% sequence identity, more preferably at least 98% sequence identity, and most preferably at least 99% sequence identity. Substantially equivalent nucleotide sequence of the invention can have lower percent sequence identities, taking into account, for example, the redundancy or degeneracy of the genetic code. Preferably, the nucleotide sequence has at least about 65% identity, more preferably at least about 75% identity, more preferably at least about 80% sequence identity, more preferably at least 85% sequence identity, more preferably at least 90% sequence identity, more preferably at least about 95% sequence identity, more preferably at least 98% sequence identity, and most preferably at least 99% sequence identity. For the purposes of the present invention, sequences having substantially equivalent biological activity and substantially equivalent expression characteristics are considered substantially equivalent. For the purposes of determining equivalence, truncation of the mature sequence (e.g., via a mutation which creates a spurious stop codon) should be disregarded. Sequence identity may be determined, e.g., using the Jotun Hein method (Hein, J. Methods Enzymol. 183:626-645 (1990)). Identity between sequences can also be determined by other methods known in the art, e.g. by varying hybridization conditions.

[0070] The term “totipotent” refers to the capability of a cell to differentiate into all of the cell types of an adult organism.

[0071] The term “transformation” means introducing DNA into a suitable host cell so that the DNA is replicable, either as an extrachromosomal element, or by chromosomal integration. The term “transfection” refers to the taking up of an expression vector by a suitable host cell, whether or not any coding sequences are in fact expressed. The term “infection” refers to the introduction of nucleic acids into a suitable host cell by use of a virus or viral vector.

[0072] As used herein, an “uptake modulating fragment,” UMF, means a series of nucleotides which mediate the uptake of a linked DNA fragment into a cell. UMFs can be readily identified using known UMFs as a target sequence or target motif with the computer-based systems described below. The presence and activity of a UMF can be confirmed by attaching the suspected UMF to a marker sequence. The resulting nucleic acid molecule is then incubated with an appropriate host under appropriate conditions and the uptake of the marker sequence is determined. As described above, a UMF will increase the frequency of uptake of a linked marker sequence.

[0073] Each of the above terms is meant to encompass all that is described for each, unless the context dictates otherwise.

[0074] 4.2 Nucleic Acids of the Invention

[0075] Nucleotide sequences of the invention are set forth in the Sequence Listing.

[0076] The isolated polynucleotides of the invention include a polynucleotide comprising the nucleotide sequence of SEQ ID NO: 796; a polynucleotide encoding the peptide sequences of SEQ ID NO: 949; and a polynucleotide comprising the nucleotide sequence encoding the mature protein coding sequence of the polynucleotide of SEQ ID NO: 796. The polynucleotides of the present invention also include, but are not limited to, a polynucleotide that hybridizes under stringent conditions to (a) the complement of the nucleotide sequence of SEQ ID NO: 796; (b) nucleotide sequences encoding the amino acid sequence set forth in SEQ ID NO: 949; (c) a polynucleotide which is an allelic variant of the polynucleotide recited above; (d) a polynucleotide which encodes a species homolog of the protein recited above; or (e) a polynucleotide that encodes a polypeptide comprising a specific domain or truncation of the polypeptide of SEQ ID NO: 949. Domains of interest may depend on the nature of the encoded polypeptide; e.g., domains in receptor-like polypeptides include ligand-binding, extracellular, transmembrane, or cytoplasmic domains, or combinations thereof; domains in immunoglobulin-like proteins include the variable immunoglobulin-like domains; domains in enzyme-like polypeptides include catalytic and substrate binding domains; and domains in ligand polypeptides include receptor-binding domains.

[0077] The polynucleotides of the invention include naturally occurring or wholly or partially synthetic DNA, e.g., cDNA and genomic DNA, and RNA, e.g., mRNA. The polynucleotides may include the entire coding region of the cDNA or may represent a portion of the coding region of the cDNA.

[0078] The present invention also provides genes corresponding to the cDNA sequences disclosed herein. The corresponding genes can be isolated in accordance with known methods using the sequence information disclosed herein. Such methods include the preparation of probes or primers from the disclosed sequence information for identification and/or amplification of genes in appropriate genomic libraries or other sources of genomic materials. Further 5′ and 3′ sequence can be obtained using methods known in the art. For example, full length cDNA or genomic DNA that corresponds to the polynucleotide of SEQ ID NO: 796 can be obtained by screening appropriate cDNA or genomic DNA libraries under suitable hybridization conditions using the polynucleotide of SEQ ID NO: 796 or a portion thereof as a probe. Alternatively, the polynucleotide of SEQ ID NO: 796 may be used as the basis for suitable primer(s) that allow identification and/or amplification of genes in appropriate genomic DNA or cDNA libraries.

[0079] The nucleic acid sequences of the invention can be assembled from ESTs and sequences (including cDNA and genomic sequences) obtained from one or more public databases, such as dbEST, gbpri, and UniGene. The EST sequences can provide identifying sequence information, representative fragment or segment information, or novel segment information for the full-length gene.

[0080] The polynucleotides of the invention also provide polynucleotides including nucleotide sequences that are substantially equivalent to the polynucleotides recited above. Polynucleotides according to the invention can have, e.g., at least about 65%, at least about 70%, at least about 75%, at least about 80%, 81%, 82%, 83%, 84%, more typically at least about 85%, 86%, 87%, 88%, 89%, more typically at least about 90%, 91%, 92%, 93%, 94%, and even more typically at least about 95%, 96%, 97%, 98%, 99% sequence identity to a polynucleotide recited above.

[0081] Included within the scope of the nucleic acid sequences of the invention are nucleic acid sequence fragments that hybridize under stringent conditions to the nucleotide sequence of SEQ ID NO: 796, or complement thereof, which fragment is greater than about 5 nucleotides, preferably 7 nucleotides, more preferably greater than 9 nucleotides and most preferably greater than 17 nucleotides. Fragments of, e.g. 15, 17, or 20 nucleotides or more that are selective for (i.e. specifically hybridize to any one of the polynucleotides of the invention) are contemplated. Probes capable of specifically hybridizing to a polynucleotide can differentiate polynucleotide sequences of the invention from other polynucleotide sequences in the same family of genes or can differentiate human genes from genes of other species, and are preferably based on unique nucleotide sequences.

[0082] The sequences falling within the scope of the present invention are not limited to these specific sequences, but also include allelic and species variations thereof. Allelic and species variations can be routinely determined by comparing the sequence provided in SEQ ID NO: 796, a representative fragment thereof, or a nucleotide sequence at least 90% identical, preferably 95% identical to SEQ ID NO: 796 with a sequence from another isolate of the same species. Furthermore, to accommodate codon variability, the invention includes nucleic acid molecules coding for the same amino acid sequences as do the specific ORFs disclosed herein. In other words, in the coding region of an ORF, substitution of one codon for another codon that encodes the same amino acid is expressly contemplated.

[0083] The nearest neighbor or homology result for the nucleic acids of the present invention, including SEQ ID NO: 796, can be obtained by searching a database using an algorithm or a program. Preferably, a BLAST which stands for Basic Local Alignment Search Tool is used to search for local sequence alignments (Altshul, S. F., J Mol. Evol. 36:290-300 (1993) and Altschul S. F., et al. J. Mol. Biol. 21:403-410 (1990)). Alternatively a FASTA version 3 search against Genpept, using Fastxy algorithm.

[0084] Species homologs (or orthologs) of the disclosed polynucleotides and proteins are also provided by the present invention. Species homologs may be isolated and identified by making suitable probes or primers from the sequences provided herein and screening a suitable nucleic acid source from the desired species.

[0085] The invention also encompasses allelic variants of the disclosed polynucleotides or proteins; that is, naturally-occurring alternative forms of the isolated polynucleotide which also encodes proteins which are identical, homologous or related to that encoded by the polynucleotides.

[0086] The nucleic acid sequences of the invention are further directed to sequences which encode variants of the described nucleic acids. These amino acid sequence variants may be prepared by methods known in the art by introducing appropriate nucleotide changes into a native or variant polynucleotide. There are two variables in the construction of amino acid sequence variants: the location of the mutation and the nature of the mutation. Nucleic acids encoding the amino acid sequence variants are preferably constructed by mutating the polynucleotide to encode an amino acid sequence that does not occur in nature. These nucleic acid alterations can be made at sites that differ in the nucleic acids from different species (variable positions) or in highly conserved regions (constant regions). Sites at such locations will typically be modified in series, e.g., by substituting first with conservative choices (e.g., hydrophobic amino acid to a different hydrophobic amino acid) and then with more distant choices (e.g., hydrophobic amino acid to a charged amino acid), and then deletions or insertions may be made at the target site. Amino acid sequence deletions generally range from about 1 to 30 residues, preferably about 1 to 10 residues, and are typically contiguous. Amino acid insertions include amino- and/or carboxyl-terminal fusions ranging in length from one to one hundred or more residues, as well as intrasequence insertions of single or multiple amino acid residues. Intrasequence insertions may range generally from about 1 to 10 amino residues, preferably from 1 to 5 residues. Examples of terminal insertions include the heterologous signal sequences necessary for secretion or for intracellular targeting in different host cells and sequences such as FLAG or poly-histidine sequences useful for purifying the expressed protein.

[0087] In a preferred method, polynucleotides encoding the novel amino acid sequences are changed via site-directed mutagenesis. This method uses oligonucleotide sequences to alter a polynucleotide to encode the desired amino acid variant, as well as sufficient adjacent nucleotides on both sides of the changed amino acid to form a stable duplex on either side of the site of being changed. In general, the techniques of site-directed mutagenesis are well known to those of skill in the art and this technique is exemplified by publications such as, Edelman et al., DNA 2:183 (1983). A versatile and efficient method for producing site-specific changes in a polynucleotide sequence was published by Zoller and Smith, Nucleic Acids Res. 10:6487-6500 (1982). PCR may also be used to create amino acid sequence variants of the novel nucleic acids. When small amounts of template DNA are used as starting material, primer(s) that differs slightly in sequence from the corresponding region in the template DNA can generate the desired amino acid variant. PCR amplification results in a population of product DNA fragments that differ from the polynucleotide template encoding the polypeptide at the position specified by the primer. The product DNA fragments replace the corresponding region in the plasmid and this gives a polynucleotide encoding the desired amino acid variant.

[0088] A further technique for generating amino acid variants is the cassette mutagenesis technique described in Wells et al., Gene 34:315 (1985); and other mutagenesis techniques well known in the art, such as, for example, the techniques in Sambrook et al., supra, and Ausubel et al., Current Protocols in Molecular Biology. Due to the inherent degeneracy of the genetic code, other DNA sequences which encode substantially the same or a functionally equivalent amino acid sequence may be used in the practice of the invention for the cloning and expression of these novel nucleic acids. Such DNA sequences include those which are capable of hybridizing to the appropriate novel nucleic acid sequence under stringent conditions.

[0089] Polynucleotides encoding preferred polypeptide truncations of the invention can be used to generate polynucleotides encoding chimeric or fusion proteins comprising one or more domains of the invention and heterologous protein sequences.

[0090] The polynucleotides of the invention additionally include the complement of any of the polynucleotides recited above. The polynucleotide can be DNA (genomic, cDNA, amplified, or synthetic) or RNA. Methods and algorithms for obtaining such polynucleotides are well known to those of skill in the art and can include, for example, methods for determining hybridization conditions that can routinely isolate polynucleotides of the desired sequence identities.

[0091] In accordance with the invention, polynucleotide sequences comprising the mature protein coding sequence corresponding to SEQ ID NO: 796, or functional equivalents thereof, may be used to generate recombinant DNA molecules that direct the expression of that nucleic acid, or a functional equivalent thereof, in appropriate host cells. Also included are the cDNA inserts of any of the clones identified herein.

[0092] A polynucleotide according to the invention can be joined to any of a variety of other nucleotide sequences by well-established recombinant DNA techniques (see Sambrook J. et al. (1989) Molecular Cloning: A Laboratory Manual, Cold Spring Harbor Laboratory, NY). Useful nucleotide sequences for joining to polynucleotides include an assortment of vectors, e.g., plasmids, cosmids, lambda phage derivatives, phagemids, and the like, that are well known in the art. Accordingly, the invention also provides a vector including a polynucleotide of the invention and a host cell containing the polynucleotide. In general, the vector contains an origin of replication functional in at least one organism, convenient restriction endonuclease sites, and a selectable marker for the host cell. Vectors according to the invention include expression vectors, replication vectors, probe generation vectors, and sequencing vectors. A host cell according to the invention can be a prokaryotic or eukaryotic cell and can be a unicellular organism or part of a multicellular organism.

[0093] The present invention further provides recombinant constructs comprising a nucleic acid having the nucleotide sequence of SEQ ID NO: 796 or a fragment thereof or any other polynucleotide of the invention. In one embodiment, the recombinant constructs of the present invention comprise a vector, such as a plasmid or viral vector, into which a nucleic acid having the nucleotide sequence of SEQ ID NO: 796 or a fragment thereof is inserted, in a forward or reverse orientation. In the case of a vector comprising one of the ORFs of the present invention, the vector may further comprise regulatory sequences, including for example, a promoter, operably linked to the ORF. Large numbers of suitable vectors and promoters are known to those of skill in the art and are commercially available for generating the recombinant constructs of the present invention. The following vectors are provided by way of example. Bacterial: pBs, phagescript, PsiX174, pBluescript SK, pBs KS, pNH8a, pNH16a, pNH18a, pNH46a (Stratagene); pTrc99A, pKK223-3, pKK233-3, pDR540, pRIT5 (Pharmacia). Eukaryotic: pWLneo, pSV2cat, pOG44, PXTI, pSG (Stratagene) pSVK3, pBPV, pMSG, pSVL (Pharmacia).

[0094] The isolated polynucleotide of the invention may be operably linked to an expression control sequence such as the pMT2 or pED expression vectors disclosed in Kaufman et al., Nucleic Acids Res. 19, 4485-4490 (1991), in order to produce the protein recombinantly. Many suitable expression control sequences are known in the art. General methods of expressing recombinant proteins are also known and are exemplified in R. Kaufman, Methods in Enzymology 185, 537-566 (1990). As defined herein “operably linked” means that the isolated polynucleotide of the invention and an expression control sequence are situated within a vector or cell in such a way that the protein is expressed by a host cell which has been transformed (transfected) with the ligated polynucleotide/expression control sequence.

[0095] Promoter regions can be selected from any desired gene using CAT (chloramphenicol transferase) vectors or other vectors with selectable markers. Two appropriate vectors are pKK232-8 and pCM7. Particular named bacterial promoters include lacI, lacZ, T3, T7, gpt, lambda PR, and trc. Eukaryotic promoters include CMV immediate early, HSV thymidine kinase, early and late SV40, LTRs from retrovirus, and mouse metallothionein-I. Selection of the appropriate vector and promoter is well within the level of ordinary skill in the art. Generally, recombinant expression vectors will include origins of replication and selectable markers permitting transformation of the host cell, e.g., the ampicillin resistance gene of E. coli and S. cerevisiae TRP1 gene, and a promoter derived from a highly-expressed gene to direct transcription of a downstream structural sequence. Such promoters can be derived from operons encoding glycolytic enzymes such as 3-phosphoglycerate kinase (PGK), a-factor, acid phosphatase, or heat shock proteins, among others. The heterologous structural sequence is assembled in appropriate phase with translation initiation and termination sequences, and preferably, a leader sequence capable of directing secretion of translated protein into the periplasmic space or extracellular medium. Optionally, the heterologous sequence can encode a fusion protein including an amino terminal identification peptide imparting desired characteristics, e.g., stabilization or simplified purification of expressed recombinant product. Useful expression vectors for bacterial use are constructed by inserting a structural DNA sequence encoding a desired protein together with suitable translation initiation and termination signals in operable reading phase with a functional promoter. The vector will comprise one or more phenotypic selectable markers and an origin of replication to ensure maintenance of the vector and to, if desirable, provide amplification within the host. Suitable prokaryotic hosts for transformation include E. coli, Bacillus subtilis, Salmonella typhimurium and various species within the genera Pseudomonas, Streptomyces, and Staphylococcus, although others may also be employed as a matter of choice.

[0096] As a representative but non-limiting example, useful expression vectors for bacterial use can comprise a selectable marker and bacterial origin of replication derived from commercially available plasmids comprising genetic elements of the well known cloning vector pBR322 (ATCC 37017). Such commercial vectors include, for example, pKK223-3 (Pharmacia Fine Chemicals, Uppsala, Sweden) and GEM 1 (Promega Biotech, Madison, Wis., USA). These pBR322 “backbone” sections are combined with an appropriate promoter and the structural sequence to be expressed. Following transformation of a suitable host strain and growth of the host strain to an appropriate cell density, the selected promoter is induced or derepressed by appropriate means (e.g., temperature shift or chemical induction) and cells are cultured for an additional period. Cells are typically harvested by centrifugation, disrupted by physical or chemical means, and the resulting crude extract retained for further purification.

[0097] Polynucleotides of the invention can also be used to induce immune responses. For example, as described in Fan et al., Nat. Biotech. 17:870-872 (1999), incorporated herein by reference, nucleic acid sequences encoding a polypeptide may be used to generate antibodies against the encoded polypeptide following topical administration of naked plasmid DNA or following injection, and preferably intra-muscular injection of the DNA. The nucleic acid sequences are preferably inserted in a recombinant expression vector and may be in the form of naked DNA.

[0098] 4.3 Antisense

[0099] Another aspect of the invention pertains to isolated antisense nucleic acid molecules that are hybridizable to or complementary to the nucleic acid molecule comprising the nucleotide sequence of SEQ ID NO: 796, or fragments, analogs or derivatives thereof. An “antisense” nucleic acid comprises a nucleotide sequence that is complementary to a “sense” nucleic acid encoding a protein, e.g., complementary to the coding strand of a double-stranded cDNA molecule or complementary to an mRNA sequence. In specific aspects, antisense nucleic acid molecules are provided that comprise a sequence complementary to at least about 10, 25, 50, 100, 250 or 500 nucleotides or an entire coding strand, or to only a portion thereof. Nucleic acid molecules encoding fragments, homologs, derivatives and analogs of a protein of SEQ ID NO: 949 or antisense nucleic acids complementary to a nucleic acid sequence of SEQ ID NO: 796 are additionally provided.

[0100] In one embodiment, an antisense nucleic acid molecule is antisense to a “coding region” of the coding strand of a nucleotide sequence of the invention. The term “coding region” refers to the region of the nucleotide sequence comprising codons which are translated into amino acid residues. In another embodiment, the antisense nucleic acid molecule is antisense to a “noncoding region” of the coding strand of a nucleotide sequence of the invention. The term “noncoding region” refers to 5′ and 3′ sequences that flank the coding region that are not translated into amino acids (i.e., also referred to as 5′ and 3′ untranslated regions).

[0101] Given the coding strand sequences encoding a nucleic acid disclosed herein (e.g., SEQ ID NO: 796), antisense nucleic acids of the invention can be designed according to the rules of Watson and Crick or Hoogsteen base pairing. The antisense nucleic acid molecule can be complementary to the entire coding region of an mRNA, but more preferably is an oligonucleotide that is antisense to only a portion of the coding or noncoding region of an mRNA. For example, the antisense oligonucleotide can be complementary to the region surrounding the translation start site of an mRNA. An antisense oligonucleotide can be, for example, about 5, 10, 15, 20, 25, 30, 35, 40, 45 or 50 nucleotides in length. An antisense nucleic acid of the invention can be constructed using chemical synthesis or enzymatic ligation reactions using procedures known in the art. For example, an antisense nucleic acid (e.g., an antisense oligonucleotide) can be chemically synthesized using naturally occurring nucleotides or variously modified nucleotides designed to increase the biological stability of the molecules or to increase the physical stability of the duplex formed between the antisense and sense nucleic acids, e.g., phosphorothioate derivatives and acridine substituted nucleotides can be used.

[0102] Examples of modified nucleotides that can be used to generate the antisense nucleic acid include: 5-fluorouracil, 5-bromouracil, 5-chlorouracil, 5-iodouracil, hypoxanthine, xanthine, 4-acetylcytosine, 5-(carboxyhydroxylmethyl) uracil, 5-carboxymethylaminomethyl-2-thiouridine, 5-carboxymethylaminomethyluracil, dihydrouracil, beta-D-galactosylqueosine, inosine, N6-isopentenyladenine, 1-methylguanine, 1-methylinosine, 2,2-dimethylguanine, 2-methyladenine, 2-methylguanine, 3-methylcytosine, 5-methylcytosine, N6-adenine, 7-methylguanine, 5-methylaminomethyluracil, 5-methoxyaminomethyl-2-thiouracil, beta-D-mannosylqueosine, 5′-methoxycarboxymethyluracil, 5-methoxyuracil, 2-methylthio-N6-isopentenyladenine, uracil-5-oxyacetic acid (v), wybutoxosine, pseudouracil, queosine, 2-thiocytosine, 5-methyl-2-thiouracil, 2-thiouracil, 4-thiouracil, 5-methyluracil, uracil-5-oxyacetic acid methylester, uracil-5-oxyacetic acid (v), 5-methyl-2-thiouracil, 3-(3-amino-3-N-2-carboxypropyl) uracil, (acp3)w, and 2,6-diaminopurine. Alternatively, the antisense nucleic acid can be produced biologically using an expression vector into which a nucleic acid has been subcloned in an antisense orientation (i.e., RNA transcribed from the inserted nucleic acid will be of an antisense orientation to a target nucleic acid of interest, described further in the following subsection).

[0103] The antisense nucleic acid molecules of the invention are typically administered to a subject or generated in situ such that they hybridize with or bind to cellular mRNA and/or genomic DNA encoding a protein according to the invention to thereby inhibit expression of the protein, e.g., by inhibiting transcription and/or translation. The hybridization can be by conventional nucleotide complementarity to form a stable duplex, or, for example, in the case of an antisense nucleic acid molecule that binds to DNA duplexes, through specific interactions in the major groove of the double helix. An example of a route of administration of antisense nucleic acid molecules of the invention includes direct injection at a tissue site. Alternatively, antisense nucleic acid molecules can be modified to target selected cells and then administered systemically. For example, for systemic administration, antisense molecules can be modified such that they specifically bind to receptors or antigens expressed on a selected cell surface, e.g., by linking the antisense nucleic acid molecules to peptides or antibodies that bind to cell surface receptors or antigens. The antisense nucleic acid molecules can also be delivered to cells using the vectors described herein. To achieve sufficient intracellular concentrations of antisense molecules, vector constructs in which the antisense nucleic acid molecule is placed under the control of a strong pol II or pol III promoter are preferred.

[0104] In yet another embodiment, the antisense nucleic acid molecule of the invention is an α-anomeric nucleic acid molecule. An α-anomeric nucleic acid molecule forms specific double-stranded hybrids with complementary RNA in which, contrary to the usual α-units, the strands run parallel to each other (Gaultier et al., Nucleic Acids Res 15: 6625-6641 (1987)). The antisense nucleic acid molecule can also comprise a 2′-o-methylribonucleotide (Inoue et al., Nucleic Acids Res 15: 6131-6148 (1987)) or a chimeric RNA-DNA analogue (Inoue et al., FEBS Lett 215: 327-330 (1987)).

[0105] 4.4 Ribozymes and PNA Moieties

[0106] In still another embodiment, an antisense nucleic acid of the invention is a ribozyme. Ribozymes are catalytic RNA molecules with ribonuclease activity that are capable of cleaving a single-stranded nucleic acid, such as an mRNA, to which they have a complementary region. Thus, ribozymes (e.g., hammerhead ribozymes (described in Haselhoff and Gerlach, Nature 334:585-591 (1988)) can be used to catalytically cleave mRNA transcripts to thereby inhibit translation of an mRNA. A ribozyme having specificity for a nucleic acid of the invention can be designed based upon the nucleotide sequence of a DNA disclosed herein (i.e., SEQ ID NO: 796). For example, a derivative of Tetrahymena L-19 IVS RNA can be constructed in which the nucleotide sequence of the active site is complementary to the nucleotide sequence to be cleaved in a SECX-encoding mRNA. See, e.g., Cech et al. U.S. Pat. No. 4,987,071; and Cech et al. U.S. Pat. No. 5,116,742. Alternatively, SECX mRNA can be used to select a catalytic RNA having a specific ribonuclease activity from a pool of RNA molecules. See, e.g., Bartel et al., Science 261:1411-1418 (1993).

[0107] Alternatively, gene expression can be inhibited by targeting nucleotide sequences complementary to the regulatory region (e.g., promoter and/or enhancers) to form triple helical structures that prevent transcription of the gene in target cells. See generally, Helene, Anticancer Drug Des. 6: 569-84 (1991); Helene et al., Ann. N. Y. Acad. Sci. 660:27-36 (1992); and Maher, Bioassays 14: 807-15 (1992).

[0108] In various embodiments, the nucleic acids of the invention can be modified at the base moiety, sugar moiety or phosphate backbone to improve, e.g., the stability, hybridization, or solubility of the molecule. For example, the deoxyribose phosphate backbone of the nucleic acids can be modified to generate peptide nucleic acids (see Hyrup et al., Bioorg Med Chem 4: 5-23 (1996)). As used herein, the terms “peptide nucleic acids” or “PNAs” refer to nucleic acid mimics, e.g., DNA mimics, in which the deoxyribose phosphate backbone is replaced by a pseudopeptide backbone and only the four natural nucleobases are retained. The neutral backbone of PNAs has been shown to allow for specific hybridization to DNA and RNA under conditions of low ionic strength. The synthesis of PNA oligomers can be performed using standard solid phase peptide synthesis protocols as described in Hyrup et al. (1996) above; Perry-O'Keefe et al., Proc. Natl. Acad. Sci. USA 93: 14670-675 (1996).

[0109] PNAs of the invention can be used in therapeutic and diagnostic applications. For example, PNAs can be used as antisense or antigene agents for sequence-specific modulation of gene expression by, e.g., inducing transcription or translation arrest or inhibiting replication. PNAs of the invention can also be used, e.g., in the analysis of single base pair mutations in a gene by, e.g., PNA directed PCR clamping; as artificial restriction enzymes when used in combination with other enzymes, e.g., S1 nucleases (Hyrup (1996) supra); or as probes or primers for DNA sequence and hybridization (Hyrup et al. (1996), supra; Perry-O'Keefe (1996), supra).

[0110] In another embodiment, PNAs of the invention can be modified, e.g., to enhance their stability or cellular uptake, by attaching lipophilic or other helper groups to PNA, by the formation of PNA-DNA chimeras, or by the use of liposomes or other techniques of drug delivery known in the art. For example, PNA-DNA chimeras can be generated that may combine the advantageous properties of PNA and DNA. Such chimeras allow DNA recognition enzymes, e.g., RNase H and DNA polymerases, to interact with the DNA portion while the PNA portion would provide high binding affinity and specificity. PNA-DNA chimeras can be linked using linkers of appropriate lengths selected in terms of base stacking, number of bonds between the nucleobases, and orientation (Hyrup (1996) above). The synthesis of PNA-DNA chimeras can be performed as described in Hyrup (1996) above and Finn et al., Nucl Acids Res 24: 3357-63 (1996). For example, a DNA chain can be synthesized on a solid support using standard phosphoramidite coupling chemistry, and modified nucleoside analogs, e.g., 5′-(4-methoxytrityl)amino-5′-deoxy-thymidine phosphoramidite, can be used between the PNA and the 5′ end of DNA (Mag et al., Nucl Acid Res 17: 5973-88 (1989)). PNA monomers are then coupled in a stepwise manner to produce a chimeric molecule with a 5′ PNA segment and a 3′ DNA segment (Finn et al. (1996) above). Alternatively, chimeric molecules can be synthesized with a 5′ DNA segment and a 3′ PNA segment. See, Petersen et al., Bioorg Med Chem Lett 5: 1119-11124 (1975).

[0111] In other embodiments, the oligonucleotide may include other appended groups such as peptides (e.g., for targeting host cell receptors in vivo), or agents facilitating transport across the cell membrane (see, e.g., Letsinger et al., Proc. Natl. Acad. Sci. U.S.A. 86:6553-6556 (1989); Lemaitre et al., Proc. Natl. Acad. Sci. 84:648-652 (1987); PCT Publication No. W088/09810) or the blood-brain barrier (see, e.g., PCT Publication No. W089/10134). In addition, oligonucleotides can be modified with hybridization triggered cleavage agents (See, e.g., Krol et al., BioTechniques 6:958-976 (1988)) or intercalating agents. (See, e.g., Zon, Pharm. Res. 5: 539-549 (1988)). To this end, the oligonucleotide may be conjugated to another molecule, e.g., a peptide, a hybridization triggered cross-linking agent, a transport agent, a hybridization-triggered cleavage agent, etc.

[0112] 4.5 Hosts

[0113] The present invention further provides host cells genetically engineered to contain the polynucleotides of the invention. For example, such host cells may contain nucleic acids of the invention introduced into the host cell using known transformation, transfection or infection methods. The present invention still further provides host cells genetically engineered to express the polynucleotides of the invention, wherein such polynucleotides are in operative association with a regulatory sequence heterologous to the host cell which drives expression of the polynucleotides in the cell.

[0114] Knowledge of nucleic acid sequences allows for modification of cells to permit, or increase, expression of endogenous polypeptide. Cells can be modified (e.g., by homologous recombination) to provide increased polypeptide expression by replacing, in whole or in part, the naturally occurring promoter with all or part of a heterologous promoter so that the cells express the polypeptide at higher levels. The heterologous promoter is inserted in such a manner that it is operatively linked to the encoding sequences. See, for example, PCT International Publication No. WO94/12650, PCT International Publication No. WO92/20808, and PCT International Publication No. WO91/09955. It is also contemplated that, in addition to heterologous promoter DNA, amplifiable marker DNA (e.g., ada, dhfr, and the multifunctional CAD gene which encodes carbamyl phosphate synthase, aspartate transcarbamylase, and dihydroorotase) and/or intron DNA may be inserted along with the heterologous promoter DNA. If linked to the coding sequence, amplification of the marker DNA by standard selection methods results in co-amplification of the desired protein coding sequences in the cells.

[0115] The host cell can be a higher eukaryotic host cell, such as a mammalian cell, a lower eukaryotic host cell, such as a yeast cell, or the host cell can be a prokaryotic cell, such as a bacterial cell. Introduction of the recombinant construct into the host cell can be effected by calcium phosphate transfection, DEAE, dextran mediated transfection, or electroporation (Davis, L. et al., Basic Methods in Molecular Biology (1986)). The host cells containing one of the polynucleotides of the invention, can be used in conventional manners to produce the gene product encoded by the isolated fragment (in the case of an ORF) or can be used to produce a heterologous protein under the control of the EMF.

[0116] Any host/vector system can be used to express one or more of the ORFs of the present invention. These include, but are not limited to, eukaryotic hosts such as HeLa cells, Cv-1 cell, COS cells, 293 cells, and Sf9 cells, as well as prokaryotic host such as E. coli and B. subtilis. The most preferred cells are those which do not normally express the particular polypeptide or protein or which expresses the polypeptide or protein at low natural level. Mature proteins can be expressed in mammalian cells, yeast, bacteria, or other cells under the control of appropriate promoters. Cell-free translation systems can also be employed to produce such proteins using RNAs derived from the DNA constructs of the present invention. Appropriate cloning and expression vectors for use with prokaryotic and eukaryotic hosts are described by Sambrook, et al., in Molecular Cloning: A Laboratory Manual, Second Edition, Cold Spring Harbor, N.Y. (1989), the disclosure of which is hereby incorporated by reference.

[0117] Various mammalian cell culture systems can also be employed to express recombinant protein. Examples of mammalian expression systems include the COS-7 lines of monkey kidney fibroblasts, described by Gluzman, Cell 23:175 (1981). Other cell lines capable of expressing a compatible vector are, for example, the C127, monkey COS cells, Chinese Hamster Ovary (CHO) cells, human kidney 293 cells, human epidermal A431 cells, human Colo205 cells, 3T3 cells, CV-1 cells, other transformed primate cell lines, normal diploid cells, cell strains derived from in vitro culture of primary tissue, primary explants, HeLa cells, mouse L cells, BHK, HL-60, U937, HaK or Jurkat cells. Mammalian expression vectors will comprise an origin of replication, a suitable promoter and also any necessary ribosome binding sites, polyadenylation site, splice donor and acceptor sites, transcriptional termination sequences, and 5′ flanking nontranscribed sequences. DNA sequences derived from the SV40 viral genome, for example, SV40 origin, early promoter, enhancer, splice, and polyadenylation sites may be used to provide the required nontranscribed genetic elements. Recombinant polypeptides and proteins produced in bacterial culture are usually isolated by initial extraction from cell pellets, followed by one or more salting-out, aqueous ion exchange or size exclusion chromatography steps. Protein refolding steps can be used, as necessary, in completing configuration of the mature protein. Finally, high performance liquid chromatography (HPLC) can be employed for final purification steps. Microbial cells employed in expression of proteins can be disrupted by any convenient method, including freeze-thaw cycling, sonication, mechanical disruption, or use of cell lysing agents.

[0118] Alternatively, it may be possible to produce the protein in lower eukaryotes such as yeast or insects or in prokaryotes such as bacteria. Potentially suitable yeast strains include Saccharomyces cerevisiae, Schizosaccharomyces pombe, Kluyveromyces strains, Candida, or any yeast strain capable of expressing heterologous proteins. Potentially suitable bacterial strains include Escherichia coli, Bacillus subtilis, Salmonella typhimurium, or any bacterial strain capable of expressing heterologous proteins. If the protein is made in yeast or bacteria, it may be necessary to modify the protein produced therein, for example by phosphorylation or glycosylation of the appropriate sites, in order to obtain the functional protein. Such covalent attachments may be accomplished using known chemical or enzymatic methods.

[0119] In another embodiment of the present invention, cells and tissues may be engineered to express an endogenous gene comprising the polynucleotides of the invention under the control of inducible regulatory elements, in which case the regulatory sequences of the endogenous gene may be replaced by homologous recombination. As described herein, gene targeting can be used to replace a gene's existing regulatory region with a regulatory sequence isolated from a different gene or a novel regulatory sequence synthesized by genetic engineering methods. Such regulatory sequences may be comprised of promoters, enhancers, scaffold-attachment regions, negative regulatory elements, transcriptional initiation sites, regulatory protein binding sites or combinations of said sequences. Alternatively, sequences which affect the structure or stability of the RNA or protein produced may be replaced, removed, added, or otherwise modified by targeting. These sequences include polyadenylation signals, mRNA stability elements, splice sites, leader sequences for enhancing or modifying transport or secretion properties of the protein, or other sequences which alter or improve the function or stability of protein or RNA molecules.

[0120] The targeting event may be a simple insertion of the regulatory sequence, placing the gene under the control of the new regulatory sequence, e.g., inserting a new promoter or enhancer or both upstream of a gene. Alternatively, the targeting event may be a simple deletion of a regulatory element, such as the deletion of a tissue-specific negative regulatory element. Alternatively, the targeting event may replace an existing element; for example, a tissue-specific enhancer can be replaced by an enhancer that has broader or different cell-type specificity than the naturally occurring elements. Here, the naturally occurring sequences are deleted and new sequences are added. In all cases, the identification of the targeting event may be facilitated by the use of one or more selectable marker genes that are contiguous with the targeting DNA, allowing for the selection of cells in which the exogenous DNA has integrated into the host cell genome. The identification of the targeting event may also be facilitated by the use of one or more marker genes exhibiting the property of negative selection, such that the negatively selectable marker is linked to the exogenous DNA, but configured such that the negatively selectable marker flanks the targeting sequence, and such that a correct homologous recombination event with sequences in the host cell genome does not result in the stable integration of the negatively selectable marker. Markers useful for this purpose include the Herpes Simplex Virus thymidine kinase (TK) gene or the bacterial xanthine-guanine phosphoribosyl-transferase (gpt) gene.

[0121] The gene targeting or gene activation techniques which can be used in accordance with this aspect of the invention are more particularly described in U.S. Pat. No. 5,272,071 to Chappel; U.S. Pat. No. 5,578,461 to Sherwin et al.; International Application No. PCT/US92/09627 (WO93/09222) by Selden et al.; and International Application No. PCT/US90/06436 (WO91/06667) by Skoultchi et al., each of which is incorporated by reference herein in its entirety.

[0122] 4.6 Polypeptides of the Invention

[0123] The isolated polypeptides of the invention include, but are not limited to, a polypeptide comprising: the amino acid sequences set forth as SEQ ID NO: 949 or an amino acid sequence encoded by the nucleotide sequence SEQ ID NO: 796 or the corresponding full length or mature protein. Polypeptides of the invention also include polypeptides preferably with biological or immunological activity that are encoded by: (a) a polynucleotide having the nucleotide sequence set forth in SEQ ID NO: 796 or (b) polynucleotides encoding the amino acid sequence set forth as SEQ ID NO: 949 or (c) polynucleotides that hybridize to the complement of the polynucleotides of either (a) or (b) under stringent hybridization conditions. The invention also provides biologically active or immunologically active variants of the amino acid sequence set forth as SEQ ID NO: 949 or the corresponding full length or mature protein; and “substantial equivalents” thereof (e.g., with at least about 65%, at least about 70%, at least about 75%, at least about 80%, at least about 85%, 86%, 87%, 88%, 89%, at least about 90%, 91%, 92%, 93%, 94%, typically at least about 95%, 96%, 97%, more typically at least about 98%, or most typically at least about 99% amino acid identity) that retain biological activity. Polypeptides encoded by allelic variants may have a similar, increased, or decreased activity compared to a polypeptide comprising SEQ ID NO: 949.

[0124] Fragments of the proteins of the present invention which are capable of exhibiting biological activity are also encompassed by the present invention. Fragments of the protein may be in linear form or they may be cyclized using known methods, for example, as described in H. U. Saragovi, et al., Bio/Technology 10:773-778 (1992) and in R. S. McDowell, et al., J. Amer. Chem. Soc. 114:9245-9253 (1992), both of which are incorporated herein by reference. Such fragments may be fused to carrier molecules such as immunoglobulins for many purposes, including increasing the valency of protein binding sites.

[0125] The present invention also provides both full-length and mature forms (for example, without a signal sequence or precursor sequence) of the disclosed proteins. The protein coding sequence is identified in the sequence listing by translation of the disclosed nucleotide sequences. The mature form of such protein may be obtained by expression of a full-length polynucleotide in a suitable mammalian cell or other host cell. The sequence of the mature form of the protein is also determinable from the amino acid sequence of the full-length form. Where proteins of the present invention are membrane bound, soluble forms of the proteins are also provided. In such forms, part or all of the regions causing the proteins to be membrane bound are deleted so that the proteins are fully secreted from the cell in which they are expressed.

[0126] Protein compositions of the present invention may further comprise an acceptable carrier, such as a hydrophilic, e.g., pharmaceutically acceptable, carrier.

[0127] The present invention further provides isolated polypeptides encoded by the nucleic acid fragments of the present invention or by degenerate variants of the nucleic acid fragments of the present invention. By “degenerate variant” is intended nucleotide fragments which differ from a nucleic acid fragment of the present invention (e.g., an ORF) by nucleotide sequence but, due to the degeneracy of the genetic code, encode an identical polypeptide sequence. Preferred nucleic acid fragments of the present invention are the ORFs that encode proteins.

[0128] A variety of methodologies known in the art can be utilized to obtain any one of the isolated polypeptides or proteins of the present invention. At the simplest level, the amino acid sequence can be synthesized using commercially available peptide synthesizers. The synthetically-constructed protein sequences, by virtue of sharing primary, secondary or tertiary structural and/or conformational characteristics with proteins may possess biological properties in common therewith, including protein activity. This technique is particularly useful in producing small peptides and fragments of larger polypeptides. Fragments are useful, for example, in generating antibodies against the native polypeptide. Thus, they may be employed as biologically active or immunological substitutes for natural, purified proteins in screening of therapeutic compounds and in immunological processes for the development of antibodies.

[0129] The polypeptides and proteins of the present invention can alternatively be purified from cells which have been altered to express the desired polypeptide or protein. As used herein, a cell is said to be altered to express a desired polypeptide or protein when the cell, through genetic manipulation, is made to produce a polypeptide or protein which it normally does not produce or which the cell normally produces at a lower level. One skilled in the art can readily adapt procedures for introducing and expressing either recombinant or synthetic sequences into eukaryotic or prokaryotic cells in order to generate a cell which produces one of the polypeptides or proteins of the present invention.

[0130] The invention also relates to methods for producing a polypeptide comprising growing a culture of host cells of the invention in a suitable culture medium, and purifying the protein from the cells or the culture in which the cells are grown. For example, the methods of the invention include a process for producing a polypeptide in which a host cell containing a suitable expression vector that includes a polynucleotide of the invention is cultured under conditions that allow expression of the encoded polypeptide. The polypeptide can be recovered from the culture, conveniently from the culture medium, or from a lysate prepared from the host cells and further purified. Preferred embodiments include those in which the protein produced by such process is a full length or mature form of the protein.

[0131] In an alternative method, the polypeptide or protein is purified from bacterial cells which naturally produce the polypeptide or protein. One skilled in the art can readily follow known methods for isolating polypeptides and proteins in order to obtain one of the isolated polypeptides or proteins of the present invention. These include, but are not limited to, immunochromatography, HPLC, size-exclusion chromatography, ion-exchange chromatography, and immuno-affinity chromatography. See, e.g., Scopes, Protein Purification: Principles and Practice, Springer-Verlag (1994); Sambrook, et al., in Molecular Cloning: A Laboratory Manual; Ausubel et al., Current Protocols in Molecular Biology. Polypeptide fragments that retain biological/immunological activity include fragments comprising greater than about 100 amino acids, or greater than about 200 amino acids, and fragments that encode specific protein domains.

[0132] The purified polypeptides can be used in in vitro binding assays which are well known in the art to identify molecules which bind to the polypeptides. These molecules include but are not limited to, for e.g., small molecules, molecules from combinatorial libraries, antibodies or other proteins. The molecules identified in the binding assay are then tested for antagonist or agonist activity in in vivo tissue culture or animal models that are well known in the art. In brief, the molecules are titrated into a plurality of cell cultures or animals and then tested for either cell/animal death or prolonged survival of the animal/cells.

[0133] In addition, the peptides of the invention or molecules capable of binding to the peptides may be complexed with toxins, e.g., ricin or cholera, or with other compounds that are toxic to cells. The toxin-binding molecule complex is then targeted to a tumor or other cell by the specificity of the binding molecule for SEQ ID NO: 949.

[0134] The protein of the invention may also be expressed as a product of transgenic animals, e.g., as a component of the milk of transgenic cows, goats, pigs, or sheep which are characterized by somatic or germ cells containing a nucleotide sequence encoding the protein.

[0135] The proteins provided herein also include proteins characterized by amino acid sequences similar to those of purified proteins but into which modification are naturally provided or deliberately engineered. For example, modifications, in the peptide or DNA sequence, can be made by those skilled in the art using known techniques. Modifications of interest in the protein sequences may include the alteration, substitution, replacement, insertion or deletion of a selected amino acid residue in the coding sequence. For example, one or more of the cysteine residues may be deleted or replaced with another amino acid to alter the conformation of the molecule. Techniques for such alteration, substitution, replacement, insertion or deletion are well known to those skilled in the art (see, e.g., U.S. Pat. No. 4,518,584). Preferably, such alteration, substitution, replacement, insertion or deletion retains the desired activity of the protein. Regions of the protein that are important for the protein function can be determined by various methods known in the art including the alanine-scanning method which involved systematic substitution of single or strings of amino acids with alanine, followed by testing the resulting alanine-containing variant for biological activity. This type of analysis determines the importance of the substituted amino acid(s) in biological activity. Regions of the protein that are important for protein function may be determined by the eMATRIX program.

[0136] Other fragments and derivatives of the sequences of proteins which would be expected to retain protein activity in whole or in part and are useful for screening or other immunological methodologies may also be easily made by those skilled in the art given the disclosures herein. Such modifications are encompassed by the present invention.

[0137] The protein may also be produced by operably linking the isolated polynucleotide of the invention to suitable control sequences in one or more insect expression vectors, and employing an insect expression system. Materials and methods for baculovirus/insect cell expression systems are commercially available in kit form from, e.g., Invitrogen, San Diego, Calif., U.S.A. (the MaxBat™ kit), and such methods are well known in the art, as described in Summers and Smith, Texas Agricultural Experiment Station Bulletin No. 1555 (1987), incorporated herein by reference. As used herein, an insect cell capable of expressing a polynucleotide of the present invention is “transformed.”

[0138] The protein of the invention may be prepared by culturing transformed host cells under culture conditions suitable to express the recombinant protein. The resulting expressed protein may then be purified from such culture (i.e., from culture medium or cell extracts) using known purification processes, such as gel filtration and ion exchange chromatography. The purification of the protein may also include an affinity column containing agents which will bind to the protein; one or more column steps over such affinity resins as concanavalin A-agarose, heparin-toyopearl™ or Cibacrom blue 3GA Sepharose™; one or more steps involving hydrophobic interaction chromatography using such resins as phenyl ether, butyl ether, or propyl ether; or immunoaffinity chromatography.

[0139] Alternatively, the protein of the invention may also be expressed in a form which will facilitate purification. For example, it may be expressed as a fusion protein, such as those of maltose binding protein (MBP), glutathione-S-transferase (GST) or thioredoxin (TRX), or as a His tag. Kits for expression and purification of such fusion proteins are commercially available from New England BioLab (Beverly, Mass.), Pharmacia (Piscataway, N.J.) and Invitrogen, respectively. The protein can also be tagged with an epitope and subsequently purified by using a specific antibody directed to such epitope. One such epitope (“FLAG®”) is commercially available from Kodak (New Haven, Conn.).

[0140] Finally, one or more reverse-phase high performance liquid chromatography (RP-HPLC) steps employing hydrophobic RP-HPLC media, e.g., silica gel having pendant methyl or other aliphatic groups, can be employed to further purify the protein. Some or all of the foregoing purification steps, in various combinations, can also be employed to provide a substantially homogeneous isolated recombinant protein. The protein thus purified is substantially free of other mammalian proteins and is defined in accordance with the present invention as an “isolated protein.”

[0141] The polypeptides of the invention include analogs (variants). This embraces fragments, as well as peptides in which one or more amino acids has been deleted, inserted, or substituted. Also, analogs of the polypeptides of the invention embrace fusions of the polypeptides or modifications of the polypeptides of the invention, wherein the polypeptide or analog is fused to another moiety or moieties, e.g., targeting moiety or another therapeutic agent. Such analogs may exhibit improved properties such as activity and/or stability. Examples of moieties which may be fused to the polypeptide or an analog include, for example, targeting moieties which provide for the delivery of polypeptide to pancreatic cells, e.g., antibodies to pancreatic cells, antibodies to immune cells such as T-cells, monocytes, dendritic cells, granulocytes, etc., as well as receptor and ligands expressed on pancreatic or immune cells. Other moieties which may be fused to the polypeptide include therapeutic agents which are used for treatment, for example, immunosuppressive drugs such as cyclosporin, SK506, azathioprine, CD3 antibodies and steroids. Also, polypeptides may be fused to immune modulators, and other cytokines such as alpha or beta interferon.

[0142] 4.6.1 Determining Polypeptide and Polynucleotide Identity and Similarity

[0143] Preferred identity and/or similarity are designed to give the largest match between the sequences tested. Methods to determine identity and similarity are codified in computer programs including, but are not limited to, the GCG program package, including GAP (Devereux, J., et al., Nucl. Acids Res. 12:387 (1984); Genetics Computer Group, University of Wisconsin, Madison, Wis.), BLASTP, BLASTN, BLASTX, FASTA (Altschul, S. F. et al., J. Molec. Biol. 215:403-410 (1990), PSI-BLAST (Altschul S. F. et al., Nucl. Acids Res. 25:3389-3402, herein incorporated by reference), eMatrix software (Wu et al., J. Comp. Biol., 6:219-235 (1999), herein incorporated by reference), eMotif software (Nevill-Manning et al, ISMB-97, 4:202-209, herein incorporated by reference), pFam software (Sonnhammer et al., Nucl. Acids Res., 26:320-322 (1998), herein incorporated by reference) and the Kyte-Doolittle hydrophobocity prediction algorithm (J. Mol Biol, 157:105-31 (1982), incorporated herein by reference). The BLAST programs are publicly available from the National Center for Biotechnology Information (NCBI) and other sources (BLAST Manual, Altschul, S., et al. NCB NLM NIH Bethesda, Md. 20894; Altschul, S., et al., J. Mol. Biol. 215:403-410 (1990).

[0144] 4.7 Chimeric and Fusion Proteins

[0145] The invention also provides chimeric or fusion proteins. As used herein, a “chimeric protein” or “fusion protein” comprises a polypeptide of the invention operatively linked to another polypeptide. Within a fusion protein the polypeptide according to the invention can correspond to all or a portion of a protein according to the invention. In one embodiment, a fusion protein comprises at least one biologically active portion of a protein according to the invention. In another embodiment, a fusion protein comprises at least two biologically active portions of a protein according to the invention. Within the fusion protein, the term “operatively linked” is intended to indicate that the polypeptide according to the invention and the other polypeptide are fused in-frame to each other. The polypeptide can be fused to the N-terminus or C-terminus, or to the middle.

[0146] For example, in one embodiment a fusion protein comprises a polypeptide according to the invention operably linked to the extracellular domain of a second protein.

[0147] In another embodiment, the fusion protein is a GST-fusion protein in which the polypeptide sequences of the invention are fused to the C-terminus of the GST (i.e., glutathione S-transferase) sequences.

[0148] In another embodiment, the fusion protein is an immunoglobulin fusion protein in which the polypeptide sequences according to the invention comprise one or more domains fused to sequences derived from a member of the immunoglobulin protein family. The immunoglobulin fusion proteins of the invention can be incorporated into pharmaceutical compositions and administered to a subject to inhibit an interaction between a ligand and a protein of the invention on the surface of a cell, to thereby suppress signal transduction in vivo. The immunoglobulin fusion proteins can be used to affect the bioavailability of a cognate ligand. Inhibition of the ligand/protein interaction may be useful therapeutically for both the treatment of proliferative and differentiative disorders, e.g., cancer as well as modulating (e.g., promoting or inhibiting) cell survival. Moreover, the immunoglobulin fusion proteins of the invention can be used as immunogens to produce antibodies in a subject, to purify ligands, and in screening assays to identify molecules that inhibit the interaction of a polypeptide of the invention with a ligand.

[0149] A chimeric or fusion protein of the invention can be produced by standard recombinant DNA techniques. For example, DNA fragments coding for the different polypeptide sequences are ligated together in-frame in accordance with conventional techniques, e.g., by employing blunt-ended or stagger-ended termini for ligation, restriction enzyme digestion to provide for appropriate termini, filling-in of cohesive ends as appropriate, alkaline phosphatase treatment to avoid undesirable joining, and enzymatic ligation. In another embodiment, the fusion gene can be synthesized by conventional techniques including automated DNA synthesizers. Alternatively, PCR amplification of gene fragments can be carried out using anchor primers that give rise to complementary overhangs between two consecutive gene fragments that can subsequently be annealed and reamplified to generate a chimeric gene sequence (see, for example, Ausubel et al. (eds.) Current Protocols in Molecular Biology, John Wiley & Sons, 1992). Moreover, many expression vectors are commercially available that already encode a fusion moiety (e.g., a GST polypeptide). A nucleic acid encoding a polypeptide of the invention can be cloned into such an expression vector such that the fusion moiety is linked in-frame to the protein of the invention.

[0150] 4.8 Gene Therapy

[0151] Mutations in the polynucleotides of the invention gene may result in loss of normal function of the encoded protein. The invention thus provides gene therapy to restore normal activity of the polypeptides of the invention; or to treat disease states involving polypeptides of the invention. Delivery of a functional gene encoding polypeptides of the invention to appropriate cells is effected ex vivo, in situ, or in vivo by use of vectors, and more particularly viral vectors (e.g., adenovirus, adeno-associated virus, or a retrovirus), or ex vivo by use of physical DNA transfer methods (e.g., liposomes or chemical treatments). See, for example, Anderson, Nature, 392(Suppl.):25-20 (1998). For additional reviews of gene therapy technology see Friedmann, Science, 244:1275-1281 (1989); Verma, Sci. Amer.: 68-84 (1990); and Miller, Nature, 357:455-460 (1992). Introduction of any one of the nucleotides of the present invention or a gene encoding the polypeptides of the present invention can also be accomplished with extrachromosomal substrates (transient expression) or artificial chromosomes (stable expression). Cells may also be cultured ex vivo in the presence of proteins of the present invention in order to proliferate or to produce a desired effect on or activity in such cells. Treated cells can then be introduced in vivo for therapeutic purposes. Alternatively, it is contemplated that in other human disease states, preventing the expression of or inhibiting the activity of polypeptides of the invention will be useful in treating the disease states. It is contemplated that antisense therapy or gene therapy could be applied to negatively regulate the expression of polypeptides of the invention.

[0152] Other methods inhibiting expression of a protein include the introduction of antisense molecules to the nucleic acids of the present invention, their complements, or their translated RNA sequences, by methods known in the art. Further, the polypeptides of the present invention can be inhibited by using targeted deletion methods, or the insertion of a negative regulatory element such as a silencer, which is tissue specific.

[0153] The present invention still further provides cells genetically engineered in vivo to express the polynucleotides of the invention, wherein such polynucleotides are in operative association with a regulatory sequence heterologous to the host cell which drives expression of the polynucleotides in the cell. These methods can be used to increase or decrease the expression of the polynucleotides of the present invention.

[0154] Knowledge of DNA sequences provided by the invention allows for modification of cells to permit, increase, or decrease, expression of endogenous polypeptide. Cells can be modified (e.g., by homologous recombination) to provide increased polypeptide expression by replacing, in whole or in part, the naturally occurring promoter with all or part of a heterologous promoter so that the cells express the protein at higher levels. The heterologous promoter is inserted in such a manner that it is operatively linked to the desired protein encoding sequences. See, for example, PCT International Publication No. WO 94/12650, PCT International Publication No. WO 92/20808, and PCT International Publication No. WO 91/09955. It is also contemplated that, in addition to heterologous promoter DNA, amplifiable marker DNA (e.g., ada, dhfr, and the multifunctional CAD gene which encodes carbamyl phosphate synthase, aspartate transcarbamylase, and dihydroorotase) and/or intron DNA may be inserted along with the heterologous promoter DNA. If linked to the desired protein coding sequence, amplification of the marker DNA by standard selection methods results in co-amplification of the desired protein coding sequences in the cells.

[0155] In another embodiment of the present invention, cells and tissues may be engineered to express an endogenous gene comprising the polynucleotides of the invention under the control of inducible regulatory elements, in which case the regulatory sequences of the endogenous gene may be replaced by homologous recombination. As described herein, gene targeting can be used to replace a gene's existing regulatory region with a regulatory sequence isolated from a different gene or a novel regulatory sequence synthesized by genetic engineering methods. Such regulatory sequences may be comprised of promoters, enhancers, scaffold-attachment regions, negative regulatory elements, transcriptional initiation sites, regulatory protein binding sites or combinations of said sequences. Alternatively, sequences which affect the structure or stability of the RNA or protein produced may be replaced, removed, added, or otherwise modified by targeting. These sequences include polyadenylation signals, mRNA stability elements, splice sites, leader sequences for enhancing or modifying transport or secretion properties of the protein, or other sequences which alter or improve the function or stability of protein or RNA molecules.

[0156] The targeting event may be a simple insertion of the regulatory sequence, placing the gene under the control of the new regulatory sequence, e.g., inserting a new promoter or enhancer or both upstream of a gene. Alternatively, the targeting event may be a simple deletion of a regulatory element, such as the deletion of a tissue-specific negative regulatory element. Alternatively, the targeting event may replace an existing element; for example, a tissue-specific enhancer can be replaced by an enhancer that has broader or different cell-type specificity than the naturally occurring elements. Here, the naturally occurring sequences are deleted and new sequences are added. In all cases, the identification of the targeting event may be facilitated by the use of one or more selectable marker genes that are contiguous with the targeting DNA, allowing for the selection of cells in which the exogenous DNA has integrated into the cell genome. The identification of the targeting event may also be facilitated by the use of one or more marker genes exhibiting the property of negative selection, such that the negatively selectable marker is linked to the exogenous DNA, but configured such that the negatively selectable marker flanks the targeting sequence, and such that a correct homologous recombination event with sequences in the host cell genome does not result in the stable integration of the negatively selectable marker. Markers useful for this purpose include the Herpes Simplex Virus thymidine kinase (TK) gene or the bacterial xanthine-guanine phosphoribosyl-transferase (gpt) gene.

[0157] The gene targeting or gene activation techniques which can be used in accordance with this aspect of the invention are more particularly described in U.S. Pat. No. 5,272,071 to Chappel; U.S. Pat. No. 5,578,461 to Sherwin et al.; International Application No. PCT/US92/09627 (WO93/09222) by Selden et al.; and International Application No. PCT/US90/06436 (WO91/06667) by Skoultchi et al., each of which is incorporated by reference herein in its entirety.

[0158] 4.9 Transgenic Animals

[0159] In preferred methods to determine biological functions of the polypeptides of the invention in vivo, one or more genes provided by the invention are either over expressed or inactivated in the germ line of animals using homologous recombination (Capecchi, Science 244:1288-1292 (1989)). Animals in which the gene is over expressed, under the regulatory control of exogenous or endogenous promoter elements, are known as transgenic animals. Animals in which an endogenous gene has been inactivated by homologous recombination are referred to as “knockout” animals. Knockout animals, preferably non-human mammals, can be prepared as described in U.S. Pat. No. 5,557,032, incorporated herein by reference. Transgenic animals are useful to determine the roles polypeptides of the invention play in biological processes, and preferably in disease states. Transgenic animals are useful as model systems to identify compounds that modulate lipid metabolism. Transgenic animals, preferably non-human mammals, are produced using methods as described in U.S. Pat. No. 5,489,743 and PCT Publication No. WO94/28122, incorporated herein by reference.

[0160] Transgenic animals can be prepared wherein all or part of a promoter of the polynucleotides of the invention is either activated or inactivated to alter the level of expression of the polypeptides of the invention. Inactivation can be carried out using homologous recombination methods described above. Activation can be achieved by supplementing or even replacing the homologous promoter to provide for increased protein expression. The homologous promoter can be supplemented by insertion of one or more heterologous enhancer elements known to confer promoter activation in a particular tissue.

[0161] The polynucleotides of the present invention also make possible the development, through, e.g., homologous recombination or knock out strategies, of animals that fail to express polypeptides of the invention or that express a variant polypeptide. Such animals are useful as models for studying the in vivo activities of polypeptide as well as for studying modulators of the polypeptides of the invention. 4.10 Uses and Biological Activity of Human Arp-like Polypeptide

[0162] The polynucleotides and proteins of the present invention are expected to exhibit one or more of the uses or biological activities (including those associated with assays cited herein) identified herein. Uses or activities described for proteins of the present invention may be provided by administration or use of such proteins or of polynucleotides encoding such proteins (such as, for example, in gene therapies or vectors suitable for introduction of DNA). The mechanism underlying the particular condition or pathology will dictate whether the polypeptides of the invention, the polynucleotides of the invention or modulators (activators or inhibitors) thereof would be beneficial to the subject in need of treatment. Thus, “therapeutic compositions of the invention” include compositions comprising isolated polynucleotides (including recombinant DNA molecules, cloned genes and degenerate variants thereof) or polypeptides of the invention (including full length protein, mature protein and truncations or domains thereof), or compounds and other substances that modulate the overall activity of the target gene products, either at the level of target gene/protein expression or target protein activity. Such modulators include polypeptides, analogs, (variants), including fragments and fusion proteins, antibodies and other binding proteins; chemical compounds that directly or indirectly activate or inhibit the polypeptides of the invention (identified, e.g., via drug screening assays as described herein); antisense polynucleotides and polynucleotides suitable for triple helix formation; and in particular antibodies or other binding partners that specifically recognize one or more epitopes of the polypeptides of the invention.

[0163] The polypeptides of the present invention may likewise be involved in cellular activation or in one of the other physiological pathways described herein.

[0164] 4.10.1 Research Uses and Utilities

[0165] The polynucleotides provided by the present invention can be used by the research community for various purposes. The polynucleotides can be used to express recombinant protein for analysis, characterization or therapeutic use; as markers for tissues in which the corresponding protein is preferentially expressed (either constitutively or at a particular stage of tissue differentiation or development or in disease states); as molecular weight markers on gels; as chromosome markers or tags (when labeled) to identify chromosomes or to map related gene positions; to compare with endogenous DNA sequences in patients to identify potential genetic disorders; as probes to hybridize and thus discover novel, related DNA sequences; as a source of information to derive PCR primers for genetic fingerprinting; as a probe to “subtract-out” known sequences in the process of discovering other novel polynucleotides; for selecting and making oligomers for attachment to a “gene chip” or other support, including for examination of expression patterns; to raise anti-protein antibodies using DNA immunization techniques; and as an antigen to raise anti-DNA antibodies or elicit another immune response. Where the polynucleotide encodes a protein which binds or potentially binds to another protein (such as, for example, in a receptor-ligand interaction), the polynucleotide can also be used in interaction trap assays (such as, for example, that described in Gyuris et al., Cell 75:791-803 (1993)) to identify polynucleotides encoding the other protein with which binding occurs or to identify inhibitors of the binding interaction.

[0166] The polypeptides provided by the present invention can similarly be used in assays to determine biological activity, including in a panel of multiple proteins for high-throughput screening; to raise antibodies or to elicit another immune response; as a reagent (including the labeled reagent) in assays designed to quantitatively determine levels of the protein (or its receptor) in biological fluids; as markers for tissues in which the corresponding polypeptide is preferentially expressed (either constitutively or at a particular stage of tissue differentiation or development or in a disease state); and, of course, to isolate correlative receptors or ligands. Proteins involved in these binding interactions can also be used to screen for peptide or small molecule inhibitors or agonists of the binding interaction.

[0167] The polypeptides of the invention are also useful for making antibody substances that are specifically immunoreactive with ARP-like proteins. Antibodies and portions thereof (eg. Fab fragments) which bind to the polypeptides of the invention can be used to identify the presence of such polypeptides in a sample. Such determinations are carried out using any suitable immunoassay format, and any polypeptide of the invention that is specifically bound by the antibody can be employed as a positive control.

[0168] Any or all of these research utilities are capable of being developed into reagent grade or kit format for commercialization as research products.

[0169] Methods for performing the uses listed above are well known to those skilled in the art. References disclosing such methods include without limitation “Molecular Cloning: A Laboratory Manual”, 2d ed., Cold Spring Harbor Laboratory Press, Sambrook, J., E. F. Fritsch and T. Maniatis eds., 1989, and “Methods in Enzymology: Guide to Molecular Cloning Techniques”, Academic Press, Berger, S. L. and A. R. Kimmel eds., 1987.

[0170] 4.10.2 Nutritional Uses

[0171] Polynucleotides and polypeptides of the present invention can also be used as nutritional sources or supplements. Such uses include without limitation use as a protein or amino acid supplement, use as a carbon source, use as a nitrogen source and use as a source of carbohydrate. In such cases the polypeptide or polynucleotide of the invention can be added to the feed of a particular organism or can be administered as a separate solid or liquid preparation, such as in the form of powder, pills, solutions, suspensions or capsules. In the case of microorganisms, the polypeptide or polynucleotide of the invention can be added to the medium in or on which the microorganism is cultured.

[0172] 4.10.3 Cytokine and Cell Proliferation/Differentiation Activity

[0173] A polypeptide of the present invention may exhibit activity relating to cytokine, cell proliferation (either inducing or inhibiting) or cell differentiation (either inducing or inhibiting) activity or may induce production of other cytokines in certain cell populations. A polynucleotide of the invention can encode a polypeptide exhibiting such attributes. Many protein factors discovered to date, including all known cytokines, have exhibited activity in one or more factor-dependent cell proliferation assays, and hence the assays serve as a convenient confirmation of cytokine activity. The activity of therapeutic compositions of the present invention is evidenced by any one of a number of routine factor dependent cell proliferation assays for cell lines including, without limitation, 32D, DA2, DA1G, T10, B9, B9/11, BaF3, MC9/G, M+(preB M+), 2E8, RB5, DA1, 123, T1165, HT2, CTLL2, TF-1, Mo7e, CMK, HUVEC, and Caco. Therapeutic compositions of the invention can be used in the following:

[0174] Assays for T-cell or thymocyte proliferation include without limitation those described in: Current Protocols in Immunology, Ed by J. E. Coligan, A. M. Kruisbeek, D. H. Margulies, E. M. Shevach, W. Strober, Pub. Greene Publishing Associates and Wiley-Interscience (Chapter 3, In Vitro assays for Mouse Lymphocyte Function 3.1-3.19; Chapter 7, Immunologic studies in Humans); Takai et al., J. Immunol. 137:3494-3500 (1986); Bertagnolli et al., J. Immunol. 145:1706-1712 (1990); Bertagnolli et al., Cell. Immunol. 133:327-341 (1991); Bertagnolli, et al., J. Immunol. 149:3778-3783 (1992); Bowman et al., J. Immunol. 152:1756-1761 (1994).

[0175] Assays for cytokine production and/or proliferation of spleen cells, lymph node cells or thymocytes include, without limitation, those described in: Polyclonal T cell stimulation, Kruisbeek, A. M. and Shevach, E. M. In Current Protocols in Immunology. J. E. e.a. Coligan eds. Vol 1 pp. 3.12.1-3.12.14, John Wiley and Sons, Toronto. 1994; and Measurement of mouse and human interleukin-γ, Schreiber, R. D. In Current Protocols in Immunology. J. E. e.a. Coligan eds. Vol 1 pp. 6.8.1-6.8.8, John Wiley and Sons, Toronto. 1994.

[0176] Assays for proliferation and differentiation of hematopoietic and lymphopoietic cells include, without limitation, those described in: Measurement of Human and Murine Interleukin 2 and Interleukin 4, Bottomly, K., Davis, L. S. and Lipsky, P. E. In Current Protocols in Immunology. J. E. e.a. Coligan eds. Vol 1 pp. 6.3.1-6.3.12, John Wiley and Sons, Toronto. 1991; deVries et al., J. Exp. Med. 173:1205-1211 (1991); Moreau et al., Nature 336:690-692 (1988); Greenberger et al., Proc. Natl. Acad. Sci. U.S.A. 80:2931-2938 (1983); Measurement of mouse and human interleukin 6—Nordan, R. In Current Protocols in Immunology. J. E. Coligan eds. Vol 1 pp. 6.6.1-6.6.5, John Wiley and Sons, Toronto. 1991; Smith et al., Proc. Natl. Acad. Sci. U.S.A. 83:1857-1861 (1986); Measurement of human Interleukin 11—Bennett, F., Giannotti, J., Clark, S. C. and Turner, K. J. In Current Protocols in Immunology. J. E. Coligan eds. Vol 1 pp. 6.15.1 John Wiley and Sons, Toronto. 1991; Measurement of mouse and human Interleukin 9—Ciarletta, A., Giannotti, J., Clark, S. C. and Turner, K. J. In Current Protocols in Immunology. J. E. Coligan eds. Vol 1 pp. 6.13.1, John Wiley and Sons, Toronto. 1991.

[0177] Assays for T-cell clone responses to antigens (which will identify, among others, proteins that affect APC-T cell interactions as well as direct T-cell effects by measuring proliferation and cytokine production) include, without limitation, those described in: Current Protocols in Immunology, Ed by J. E. Coligan, A. M. Kruisbeek, D. H. Margulies, E. M. Shevach, W Strober, Pub. Greene Publishing Associates and Wiley-Interscience (Chapter 3, In Vitro assays for Mouse Lymphocyte Function; Chapter 6, Cytokines and their cellular receptors; Chapter 7, Immunologic studies in Humans); Weinberger et al., Proc. Natl. Acad. Sci. USA 77:6091-6095 (1980); Weinberger et al., Eur. J. Immun. 11:405-411 (1981); Takai et al., J. Immunol. 137:3494-3500 (1986); Takai et al., J. Immunol. 140:508-512 (1988).

[0178] 4.10.4 Stem Cell Growth Factor Activity

[0179] A polypeptide of the present invention may exhibit stem cell growth factor activity and be involved in the proliferation, differentiation and survival of pluripotent and totipotent stem cells including primordial germ cells, embryonic stem cells, hematopoietic stem cells and/or germ line stem cells. Administration of the polypeptide of the invention to stem cells in vivo or ex vivo is expected to maintain and expand cell populations in a totipotential or pluripotential state which would be useful for re-engineering damaged or diseased tissues, transplantation, and manufacture of bio-pharmaceuticals and the development of bio-sensors. The ability to produce large quantities of human cells has important working applications for the production of human proteins which currently must be obtained from non-human sources or donors, implantation of cells to treat diseases such as Parkinson's, Alzheimer's and other neurodegenerative diseases; tissues for grafting such as bone marrow, skin, cartilage, tendons, bone, muscle (including cardiac muscle), blood vessels, cornea, neural cells, gastrointestinal cells and others; and organs for transplantation such as kidney, liver, pancreas (including islet cells), heart and lung.

[0180] It is contemplated that multiple different exogenous growth factors and/or cytokines may be administered in combination with the polypeptide of the invention to achieve the desired effect, including any of the growth factors listed herein, other stem cell maintenance factors, and specifically including stem cell factor (SCF), leukemia inhibitory factor (LIF), Flt-3 ligand (Flt-3L), any of the interleukins, recombinant soluble IL-6 receptor fused to IL-6, macrophage inflammatory protein 1-alpha (MIP-1-alpha), G-CSF, GM-CSF, thrombopoietin (TPO), platelet factor 4 (PF-4), platelet-derived growth factor (PDGF), neural growth factors and basic fibroblast growth factor (bFGF).

[0181] Since totipotent stem cells can give rise to virtually any mature cell type, expansion of these cells in culture will facilitate the production of large quantities of mature cells. Techniques for culturing stem cells are known in the art and administration of polypeptides of the invention, optionally with other growth factors and/or cytokines, is expected to enhance the survival and proliferation of the stem cell populations. This can be accomplished by direct administration of the polypeptide of the invention to the culture medium. Alternatively, stroma cells transfected with a polynucleotide that encodes for the polypeptide of the invention can be used as a feeder layer for the stem cell populations in culture or in vivo. Stromal support cells for feeder layers may include embryonic bone marrow fibroblasts, bone marrow stromal cells, fetal liver cells, or cultured embryonic fibroblasts (see U.S. Pat. No. 5,690,926).

[0182] Stem cells themselves can be transfected with a polynucleotide of the invention to induce autocrine expression of the polypeptide of the invention. This will allow for generation of undifferentiated totipotential/pluripotential stem cell lines that are useful as is or that can then be differentiated into the desired mature cell types. These stable cell lines can also serve as a source of undifferentiated totipotential/pluripotential mRNA to create cDNA libraries and templates for polymerase chain reaction experiments. These studies would allow for the isolation and identification of differentially expressed genes in stem cell populations that regulate stem cell proliferation and/or maintenance.

[0183] Expansion and maintenance of totipotent stem cell populations will be useful in the treatment of many pathological conditions. For example, polypeptides of the present invention may be used to manipulate stem cells in culture to give rise to neuroepithelial cells that can be used to augment or replace cells damaged by illness, autoimmune disease, accidental damage or genetic disorders. The polypeptide of the invention may be useful for inducing the proliferation of neural cells and for the regeneration of nerve and brain tissue, i.e. for the treatment of central and peripheral nervous system diseases and neuropathies, as well as mechanical and traumatic disorders which involve degeneration, death or trauma to neural cells or nerve tissue. In addition, the expanded stem cell populations can also be genetically altered for gene therapy purposes and to decrease host rejection of replacement tissues after grafting or implantation.

[0184] Expression of the polypeptide of the invention and its effect on stem cells can also be manipulated to achieve controlled differentiation of the stem cells into more differentiated cell types. A broadly applicable method of obtaining pure populations of a specific differentiated cell type from undifferentiated stem cell populations involves the use of a cell-type specific promoter driving a selectable marker. The selectable marker allows only cells of the desired type to survive. For example, stem cells can be induced to differentiate into cardiomyocytes (Wobus et al., Differentiation, 48: 173-182 (1991); Klug et al., J. Clin. Invest. 98: 216-224 (1998)) or skeletal muscle cells (Browder, L. W. In: Principles of Tissue Engineering eds. Lanza et al., Academic Press (1997)). Alternatively, directed differentiation of stem cells can be accomplished by culturing the stem cells in the presence of a differentiation factor such as retinoic acid and an antagonist of the polypeptide of the invention which would inhibit the effects of endogenous stem cell factor activity and allow differentiation to proceed.

[0185] In vitro cultures of stem cells can be used to determine if the polypeptide of the invention exhibits stem cell growth factor activity. Stem cells are isolated from any one of various cell sources (including hematopoietic stem cells and embryonic stem cells) and cultured on a feeder layer, as described by Thompson et al. Proc. Natl. Acad. Sci, U.S.A., 92:7844-7848 (1995), in the presence of the polypeptide of the invention alone or in combination with other growth factors or cytokines. The ability of the polypeptide of the invention to induce stem cells proliferation is determined by colony formation on semi-solid support e.g. as described by Bernstein et al., Blood, 77: 2316-2321 (1991).

[0186] 4.10.5 Hematopoiesis Regulating Activity

[0187] A polypeptide of the present invention may be involved in regulation of hematopoiesis and, consequently, in the treatment of myeloid or lymphoid cell disorders. Even marginal biological activity in support of colony forming cells or of factor-dependent cell lines indicates involvement in regulating hematopoiesis, e.g. in supporting the growth and proliferation of erythroid progenitor cells alone or in combination with other cytokines, thereby indicating utility, for example, in treating various anemias or for use in conjunction with irradiation/chemotherapy to stimulate the production of erythroid precursors and/or erythroid cells; in supporting the growth and proliferation of myeloid cells such as granulocytes and monocytes/macrophages (i.e., traditional CSF activity) useful, for example, in conjunction with chemotherapy to prevent or treat consequent myelo-suppression; in supporting the growth and proliferation of megakaryocytes and consequently of platelets thereby allowing prevention or treatment of various platelet disorders such as thrombocytopenia, and generally for use in place of or complimentary to platelet transfusions; and/or in supporting the growth and proliferation of hematopoietic stem cells which are capable of maturing to any and all of the above-mentioned hematopoietic cells and therefore find therapeutic utility in various stem cell disorders (such as those usually treated with transplantation, including, without limitation, aplastic anemia and paroxysmal nocturnal hemoglobinuria), as well as in repopulating the stem cell compartment post irradiation/chemotherapy, either in vivo or ex vivo (i.e., in conjunction with bone marrow transplantation or with peripheral progenitor cell transplantation (homologous or heterologous)) as normal cells or genetically manipulated for gene therapy.

[0188] Therapeutic compositions of the invention can be used in the following:

[0189] Suitable assays for proliferation and differentiation of various hematopoietic lines are cited above.

[0190] Assays for embryonic stem cell differentiation (which will identify, among others, proteins that influence embryonic differentiation hematopoiesis) include, without limitation, those described in: Johansson et al. Cell. Biol. 15:141-151 (1995); Keller et al., Mol. Cell. Biol. 13:473-486 (1993); McClanahan et al., Blood 81:2903-2915 (1993).

[0191] Assays for stem cell survival and differentiation (which will identify, among others, proteins that regulate lympho-hematopoiesis) include, without limitation, those described in: Methylcellulose colony forming assays, Freshney, M. G. In Culture of Hematopoietic Cells. R. I. Freshney, et al. eds. Vol pp. 265-268, Wiley-Liss, Inc., New York, N.Y. 1994; Hirayama et al., Proc. Natl. Acad. Sci. USA 89:5907-5911 (1992); Primitive hematopoietic colony forming cells with high proliferative potential, McNiece, I. K. and Briddell, R. A. In Culture of Hematopoietic Cells. R. I. Freshney, et al. eds. Vol pp. 23-39, Wiley-Liss, Inc., New York, N.Y. 1994; Neben et al., Exp. Hematol. 22:353-359 (1994); Cobblestone area forming cell assay, Ploemacher, R. E. In Culture of Hematopoietic Cells. R. I. Freshney, et al. eds. Vol pp. 1-21, Wiley-Liss, Inc., New York, N.Y. 1994; Long term bone marrow cultures in the presence of stromal cells, Spooncer, E., Dexter, M. and Allen, T. In Culture of Hematopoietic Cells. R. I. Freshney, et al. eds. Vol pp. 163-179, Wiley-Liss, Inc., New York, N.Y. 1994; Long term culture initiating cell assay, Sutherland, H. J. In Culture of Hematopoietic Cells. R. I. Freshney, et al. eds. Vol pp. 139-162, Wiley-Liss, Inc., New York, N.Y. 1994.

[0192] 4.10.6 Tissue Growth Activity

[0193] A polypeptide of the present invention also may be involved in bone, cartilage, tendon, ligament and/or nerve tissue growth or regeneration, as well as in wound healing and tissue repair and replacement, and in healing of burns, incisions and ulcers.

[0194] A polypeptide of the present invention which induces cartilage and/or bone growth in circumstances where bone is not normally formed has application in the healing of bone fractures and cartilage damage or defects in humans and other animals. Compositions of a polypeptide, antibody, binding partner, or other modulator of the invention may have prophylactic use in closed as well as open fracture reduction and also in the improved fixation of artificial joints. De novo bone formation induced by an osteogenic agent contributes to the repair of congenital, trauma induced, or oncologic resection induced craniofacial defects, and also is useful in cosmetic plastic surgery.

[0195] A polypeptide of this invention may also be involved in attracting bone-forming cells, stimulating growth of bone-forming cells, or inducing differentiation of progenitors of bone-forming cells. Treatment of osteoporosis, osteoarthritis, bone degenerative disorders, or periodontal disease, such as through stimulation of bone and/or cartilage repair or by blocking inflammation or processes of tissue destruction (collagenase activity, osteoclast activity, etc.) mediated by inflammatory processes may also be possible using the composition of the invention.

[0196] Another category of tissue regeneration activity that may involve the polypeptide of the present invention is tendon/ligament formation. Induction of tendon/ligament-like tissue or other tissue formation in circumstances where such tissue is not normally formed has application in the healing of tendon or ligament tears, deformities and other tendon or ligament defects in humans and other animals. Such a preparation employing a tendon/ligament-like tissue inducing protein may have prophylactic use in preventing damage to tendon or ligament tissue, as well as use in the improved fixation of tendon or ligament to bone or other tissues, and in repairing defects to tendon or ligament tissue. De novo tendon/ligament-like tissue formation induced by a composition of the present invention contributes to the repair of congenital, trauma induced, or other tendon or ligament defects of other origin, and is also useful in cosmetic plastic surgery for attachment or repair of tendons or ligaments. The compositions of the present invention may provide environment to attract tendon- or ligament-forming cells, stimulate growth of tendon- or ligament-forming cells, induce differentiation of progenitors of tendon- or ligament-forming cells, or induce growth of tendon/ligament cells or progenitors ex vivo for return in vivo to effect tissue repair. The compositions of the invention may also be useful in the treatment of tendinitis, carpal tunnel syndrome and other tendon or ligament defects. The compositions may also include an appropriate matrix and/or sequestering agent as a carrier as is well known in the art.

[0197] The compositions of the present invention may also be useful for proliferation of neural cells and for regeneration of nerve and brain tissue, i.e. for the treatment of central and peripheral nervous system diseases and neuropathies, as well as mechanical and traumatic disorders, which involve degeneration, death or trauma to neural cells or nerve tissue. More specifically, a composition may be used in the treatment of diseases of the peripheral nervous system, such as peripheral nerve injuries, peripheral neuropathy and localized neuropathies, and central nervous system diseases, such as Alzheimer's, Parkinson's disease, Huntington's disease, amyotrophic lateral sclerosis, and Shy-Drager syndrome. Further conditions which may be treated in accordance with the present invention include mechanical and traumatic disorders, such as spinal cord disorders, head trauma and cerebrovascular diseases such as stroke. Peripheral neuropathies resulting from chemotherapy or other medical therapies may also be treatable using a composition of the invention.

[0198] Compositions of the invention may also be useful to promote better or faster closure of non-healing wounds, including without limitation pressure ulcers, ulcers associated with vascular insufficiency, surgical and traumatic wounds, and the like.

[0199] Compositions of the present invention may also be involved in the generation or regeneration of other tissues, such as organs (including, for example, pancreas, liver, intestine, kidney, skin, or endothelium), muscle (smooth, skeletal or cardiac) and vascular (including vascular endothelium) tissue, or for promoting the growth of cells comprising such tissues. Part of the desired effects may be by inhibition or modulation of fibrotic scarring may allow normal tissue to regenerate. A polypeptide of the present invention may also exhibit angiogenic activity.

[0200] A composition of the present invention may also be useful for gut protection or regeneration and treatment of lung or liver fibrosis, reperfusion injury in various tissues, and conditions resulting from systemic cytokine damage.

[0201] A composition of the present invention may also be useful for promoting or inhibiting differentiation of tissues described above from precursor tissues or cells; or for inhibiting the growth of tissues described above.

[0202] Therapeutic compositions of the invention can be used in the following:

[0203] Assays for tissue generation activity include, without limitation, those described in: International Patent Publication No. WO95/16035 (bone, cartilage, tendon); International Patent Publication No. WO95/05846 (nerve, neuronal); International Patent Publication No. WO91/07491 (skin, endothelium).

[0204] Assays for wound healing activity include, without limitation, those described in: Winter, Epidermal Wound Healing, pps. 71-112 (Maibach, H. I. and Rovee, D. T., eds.), Year Book Medical Publishers, Inc., Chicago, as modified by Eaglstein and Mertz, J. Invest. Dermatol 71:382-84 (1978).

[0205] 4.10.7 Immune Function Stimulating or Suppressing Activity

[0206] A polypeptide of the present invention may also exhibit immune stimulating or immune suppressing activity, including without limitation the activities for which assays are described herein. A polynucleotide of the invention can encode a polypeptide exhibiting such activities. A protein may be useful in the treatment of various immune deficiencies and disorders (including severe combined immunodeficiency (SCID)), e.g., in regulating (up or down) growth and proliferation of T and/or B lymphocytes, as well as effecting the cytolytic activity of NK cells and other cell populations. These immune deficiencies may be genetic or be caused by viral (e.g., HIV) as well as bacterial or fungal infections, or may result from autoimmune disorders. More specifically, infectious diseases caused by viral, bacterial, fungal or other infection may be treatable using a protein of the present invention, including infections by HIV, hepatitis viruses, herpes viruses, mycobacteria, Leishmania spp., malaria spp. and various fungal infections such as candidiasis. Of course, in this regard, proteins of the present invention may also be useful where a boost to the immune system generally may be desirable, i.e., in the treatment of cancer.

[0207] Autoimmune disorders which may be treated using a protein of the present invention include, for example, connective tissue disease, multiple sclerosis, systemic lupus erythematosus, rheumatoid arthritis, autoimmune pulmonary inflammation, Guillain-Barre syndrome, autoimmune thyroiditis, insulin dependent diabetes mellitis, myasthenia gravis, graft-versus-host disease and autoimmune inflammatory eye disease. Such a protein (or antagonists thereof, including antibodies) of the present invention may also to be useful in the treatment of allergic reactions and conditions (e.g., anaphylaxis, serum sickness, drug reactions, food allergies, insect venom allergies, mastocytosis, allergic rhinitis, hypersensitivity pneumonitis, urticaria, angioedema, eczema, atopic dermatitis, allergic contact dermatitis, erythema multiforme, Stevens-Johnson syndrome, allergic conjunctivitis, atopic keratoconjunctivitis, venereal keratoconjunctivitis, giant papillary conjunctivitis and contact allergies), such as asthma (particularly allergic asthma) or other respiratory problems. Other conditions, in which immune suppression is desired (including, for example, organ transplantation), may also be treatable using a protein (or antagonists thereof) of the present invention. The therapeutic effects of the polypeptides or antagonists thereof on allergic reactions can be evaluated by in vivo animals models such as the cumulative contact enhancement test (Lastbom et al., Toxicology 125:59-66 (1998)), skin prick test (Hoffmann et al., Allergy 54: 446-54 (1999)), guinea pig skin sensitization test (Vohr et al., Arch. Toxocol. 73: 501-9), and murine local lymph node assay (Kimber et al., J. Toxicol. Environ. Health 53: 563-79).

[0208] Using the proteins of the invention it may also be possible to modulate immune responses, in a number of ways. Down regulation may be in the form of inhibiting or blocking an immune response already in progress or may involve preventing the induction of an immune response. The functions of activated T cells may be inhibited by suppressing T cell responses or by inducing specific tolerance in T cells, or both. Immunosuppression of T cell responses is generally an active, non-antigen-specific, process which requires continuous exposure of the T cells to the suppressive agent. Tolerance, which involves inducing non-responsiveness or anergy in T cells, is distinguishable from immunosuppression in that it is generally antigen-specific and persists after exposure to the tolerizing agent has ceased. Operationally, tolerance can be demonstrated by the lack of a T cell response upon reexposure to specific antigen in the absence of the tolerizing agent.

[0209] Down regulating or preventing one or more antigen functions (including without limitation B lymphocyte antigen functions (such as, for example, B7)), e.g., preventing high level lymphokine synthesis by activated T cells, will be useful in situations of tissue, skin and organ transplantation and in graft-versus-host disease (GVHD). For example, blockage of T cell function should result in reduced tissue destruction in tissue transplantation. Typically, in tissue transplants, rejection of the transplant is initiated through its recognition as foreign by T cells, followed by an immune reaction that destroys the transplant. The administration of a therapeutic composition of the invention may prevent cytokine synthesis by immune cells, such as T cells, and thus acts as an immunosuppressant. Moreover, a lack of costimulation may also be sufficient to anergize the T cells, thereby inducing tolerance in a subject. Induction of long-term tolerance by B lymphocyte antigen-blocking reagents may avoid the necessity of repeated administration of these blocking reagents. To achieve sufficient immunosuppression or tolerance in a subject, it may also be necessary to block the function of a combination of B lymphocyte antigens.

[0210] The efficacy of particular therapeutic compositions in preventing organ transplant rejection or GVHD can be assessed using animal models that are predictive of efficacy in humans. Examples of appropriate systems which can be used include allogeneic cardiac grafts in rats and xenogeneic pancreatic islet cell grafts in mice, both of which have been used to examine the immunosuppressive effects of CTLA4Ig fusion proteins in vivo as described in Lenschow et al., Science 257:789-792 (1992) and Turka et al., Proc. Natl. Acad. Sci USA, 89:11102-11105 (1992). In addition, murine models of GVHD (see Paul ed., Fundamental Immunology, Raven Press, New York, 1989, pp. 846-847) can be used to determine the effect of therapeutic compositions of the invention on the development of that disease.

[0211] Blocking antigen function may also be therapeutically useful for treating autoimmune diseases. Many autoimmune disorders are the result of inappropriate activation of T cells that are reactive against self tissue and which promote the production of cytokines and autoantibodies involved in the pathology of the diseases. Preventing the activation of autoreactive T cells may reduce or eliminate disease symptoms. Administration of reagents which block stimulation of T cells can be used to inhibit T cell activation and prevent production of autoantibodies or T cell-derived cytokines which may be involved in the disease process. Additionally, blocking reagents may induce antigen-specific tolerance of autoreactive T cells which could lead to long-term relief from the disease. The efficacy of blocking reagents in preventing or alleviating autoimmune disorders can be determined using a number of well-characterized animal models of human autoimmune diseases. Examples include murine experimental autoimmune encephalitis, systemic lupus erythmatosis in MRL/lpr/lpr mice or NZB hybrid mice, murine autoimmune collagen arthritis, diabetes mellitus in NOD mice and BB rats, and murine experimental myasthenia gravis (see Paul ed., Fundamental Immunology, Raven Press, New York, 1989, pp. 840-856).

[0212] Upregulation of an antigen function (e.g., a B lymphocyte antigen function), as a means of up regulating immune responses, may also be useful in therapy. Upregulation of immune responses may be in the form of enhancing an existing immune response or eliciting an initial immune response. For example, enhancing an immune response may be useful in cases of viral infection, including systemic viral diseases such as influenza, the common cold, and encephalitis.

[0213] Alternatively, anti-viral immune responses may be enhanced in an infected patient by removing T cells from the patient, costimulating the T cells in vitro with viral antigen-pulsed APCs either expressing a peptide of the present invention or together with a stimulatory form of a soluble peptide of the present invention and reintroducing the in vitro activated T cells into the patient. Another method of enhancing anti-viral immune responses would be to isolate infected cells from a patient, transfect them with a nucleic acid encoding a protein of the present invention as described herein such that the cells express all or a portion of the protein on their surface, and reintroduce the transfected cells into the patient. The infected cells would now be capable of delivering a costimulatory signal to, and thereby activate, T cells in vivo.

[0214] A polypeptide of the present invention may provide the necessary stimulation signal to T cells to induce a T cell mediated immune response against the transfected tumor cells. In addition, tumor cells which lack MHC class I or MHC class II molecules, or which fail to reexpress sufficient amounts of MHC class I or MHC class II molecules, can be transfected with nucleic acid encoding all or a portion of (e.g., a cytoplasmic-domain truncated portion) of an MHC class I alpha chain protein and β₂ microglobulin protein or an MHC class II alpha chain protein and an MHC class II beta chain protein to thereby express MHC class I or MHC class II proteins on the cell surface. Expression of the appropriate class I or class II MHC in conjunction with a peptide having the activity of a B lymphocyte antigen (e.g., B7-1, B7-2, B7-3) induces a T cell mediated immune response against the transfected tumor cell. Optionally, a gene encoding an antisense construct which blocks expression of an MHC class II associated protein, such as the invariant chain, can also be cotransfected with a DNA encoding a peptide having the activity of a B lymphocyte antigen to promote presentation of tumor associated antigens and induce tumor specific immunity. Thus, the induction of a T cell mediated immune response in a human subject may be sufficient to overcome tumor-specific tolerance in the subject.

[0215] The activity of a protein of the invention may, among other means, be measured by the following methods:

[0216] Suitable assays for thymocyte or splenocyte cytotoxicity include, without limitation, those described in: Current Protocols in Immunology, Ed by J. E. Coligan, A. M. Kruisbeek, D. H. Margulies, E. M. Shevach, W. Strober, Pub. Greene Publishing Associates and Wiley-Interscience (Chapter 3, In Vitro assays for Mouse Lymphocyte Function 3.1-3.19; Chapter 7, Immunologic studies in Humans); Herrmann et al., Proc. Natl. Acad. Sci. USA 78:2488-2492 (1981); Herrmann et al., J. Immunol. 128:1968-1974 (1982); Handa et al., J. Immunol. 135:1564-1572 (1985); Takai et al., J. Immunol. 137:3494-3500 (1986); Takai et al., J. Immunol. 140:508-512 (1988); Bowman et al., J. Virology 61:1992-1998; Bertagnolli et al., Cell. Immunol. 133:327-341 (1991); Brown et al., J. Immunol. 153:3079-3092 (1994).

[0217] Assays for T-cell-dependent immunoglobulin responses and isotype switching (which will identify, among others, proteins that modulate T-cell dependent antibody responses and that affect Th1/Th2 profiles) include, without limitation, those described in: Maliszewski, J. Immunol. 144:3028-3033 (1990); and Assays for B cell function: In vitro antibody production, Mond, J. J. and Brunswick, M. In Current Protocols in Immunology. J. E. e.a. Coligan eds. Vol 1 pp. 3.8.1-3.8.16, John Wiley and Sons, Toronto. 1994.

[0218] Mixed lymphocyte reaction (MLR) assays (which will identify, among others, proteins that generate predominantly Th1 and CTL responses) include, without limitation, those described in: Current Protocols in Immunology, Ed by J. E. Coligan, A. M. Kruisbeek, D. H. Margulies, E. M. Shevach, W. Strober, Pub. Greene Publishing Associates and Wiley-Interscience (Chapter 3, In Vitro assays for Mouse Lymphocyte Function 3.1-3.19; Chapter 7, Immunologic studies in Humans); Takai et al., J. Immunol. 137:3494-3500 (1986); Takai et al., J. Immunol. 140:508-512 (1988); Bertagnolli et al., J. Immunol. 149:3778-3783 (1992).

[0219] Dendritic cell-dependent assays (which will identify, among others, proteins expressed by dendritic cells that activate naive T-cells) include, without limitation, those described in: Guery et al., J. Immunol. 134:536-544 (1995); Inaba et al., J. Exp. Med. 173:549-559 (1991); Macatonia et al., J. Immunol. 154:5071-5079 (1995); Porgador et al., J. Exp. Med. 182:255-260 (1995); Nair et al., J. Virol. 67:4062-4069 (1993); Huang et al., Science 264:961-965 (1994); Macatonia et al., J. Exp. Med. 169:1255-1264 (1989); Bhardwaj et al., J. Clin. Invest. 94:797-807 (1994); and Inaba et al., J. Exp. Med. 172:631-640 (1990).

[0220] Assays for lymphocyte survival/apoptosis (which will identify, among others, proteins that prevent apoptosis after superantigen induction and proteins that regulate lymphocyte homeostasis) include, without limitation, those described in: Darzynkiewicz et al., Cytometry 13:795-808 (1992); Gorczyca et al., Leukemia 7:659-670 (1993); Gorczyca et al., Cancer Res. 53:1945-1951 (1993); Itoh et al., Cell 66:233-243 (1991); Zacharchuk, J. Immunol. 145:4037-4045 (1990); Zamai et al., Cytometry 14:891-897 (1993); Gorczyca et al., Int. J. Oncol. 1:639-648 (1992).

[0221] Assays for proteins that influence early steps of T-cell commitment and development include, without limitation, those described in: Antica et al., Blood 84:111-117 (1994); Fine et al., Cell. Immunol. 155:111-122 (1994); Galy et al., Blood 85:2770-2778 (1995); Toki et al., Proc. Nat. Acad Sci. USA 88:7548-7551 (1991).

[0222] 4.10.8 Activin/Inhibin Activity

[0223] A polypeptide of the present invention may also exhibit activin- or inhibin-related activities. A polynucleotide of the invention may encode a polypeptide exhibiting such characteristics. Inhibins are characterized by their ability to inhibit the release of follicle stimulating hormone (FSH), while activins are characterized by their ability to stimulate the release of follicle stimulating hormone (FSH). Thus, a polypeptide of the present invention, alone or in heterodimers with a member of the inhibin family, may be useful as a contraceptive based on the ability of inhibins to decrease fertility in female mammals and decrease spermatogenesis in male mammals. Administration of sufficient amounts of other inhibins can induce infertility in these mammals. Alternatively, the polypeptide of the invention, as a homodimer or as a heterodimer with other protein subunits of the inhibin group, may be useful as a fertility inducing therapeutic, based upon the ability of activin molecules in stimulating FSH release from cells of the anterior pituitary. See, for example, U.S. Pat. No. 4,798,885. A polypeptide of the invention may also be useful for advancement of the onset of fertility in sexually immature mammals, so as to increase the lifetime reproductive performance of domestic animals such as, but not limited to, cows, sheep and pigs.

[0224] The activity of a polypeptide of the invention may, among other means, be measured by the following methods.

[0225] Assays for activin/inhibin activity include, without limitation, those described in: Vale et al., Endocrinology 91:562-572 (1972); Ling et al., Nature 321:779-782 (1986); Vale et al., Nature 321:776-779 (1986); Mason et al., Nature 318:659-663 (1985); Forage et al., Proc. Natl. Acad. Sci. USA 83:3091-3095 (1986).

[0226] 4.10.9 Chemotactic/Chemokinetic Activity

[0227] A polypeptide of the present invention may be involved in chemotactic or chemokinetic activity for mammalian cells, including, for example, monocytes, fibroblasts, neutrophils, T-cells, mast cells, eosinophils, epithelial and/or endothelial cells. A polynucleotide of the invention can encode a polypeptide exhibiting such attributes. Chemotactic and chemokinetic receptor activation can be used to mobilize or attract a desired cell population to a desired site of action. Chemotactic or chemokinetic compositions (e.g. proteins, antibodies, binding partners, or modulators of the invention) provide particular advantages in treatment of wounds and other trauma to tissues, as well as in treatment of localized infections. For example, attraction of lymphocytes, monocytes or neutrophils to tumors or sites of infection may result in improved immune responses against the tumor or infecting agent.

[0228] A protein or peptide has chemotactic activity for a particular cell population if it can stimulate, directly or indirectly, the directed orientation or movement of such cell population. Preferably, the protein or peptide has the ability to directly stimulate directed movement of cells. Whether a particular protein has chemotactic activity for a population of cells can be readily determined by employing such protein or peptide in any known assay for cell chemotaxis.

[0229] Therapeutic compositions of the invention can be used in the following:

[0230] Assays for chemotactic activity (which will identify proteins that induce or prevent chemotaxis) consist of assays that measure the ability of a protein to induce the migration of cells across a membrane as well as the ability of a protein to induce the adhesion of one cell population to another cell population. Suitable assays for movement and adhesion include, without limitation, those described in: Current Protocols in Immunology, Ed by J. E. Coligan, A. M. Kruisbeek, D. H. Marguiles, E. M. Shevach, W. Strober, Pub. Greene Publishing Associates and Wiley-Interscience (Chapter 6.12, Measurement of alpha and beta Chemokines 6.12.1-6.12.28; Taub et al. J. Clin. Invest. 95:1370-1376 (1995); Lind et al. APMIS 103:140-146 (1995); Muller et al Eur. J. Immunol. 25:1744-1748; Gruber et al. J. Immunol. 152:5860-5867 (1994); Johnston et al. J. Immunol. 153:1762-1768 (1994).

[0231] 4.10.10 Hemostatic and Thrombolytic Activity

[0232] A polypeptide of the invention may also be involved in hemostatis or thrombolysis or thrombosis. A polynucleotide of the invention can encode a polypeptide exhibiting such attributes. Compositions may be useful in treatment of various coagulation disorders (including hereditary disorders, such as hemophilias) or to enhance coagulation and other hemostatic events in treating wounds resulting from trauma, surgery or other causes. A composition of the invention may also be useful for dissolving or inhibiting formation of thromboses and for treatment and prevention of conditions resulting therefrom (such as, for example, infarction of cardiac and central nervous system vessels (e.g., stroke).

[0233] Therapeutic compositions of the invention can be used in the following:

[0234] Assay for hemostatic and thrombolytic activity include, without limitation, those described in: Linet et al., J. Clin. Pharmacol. 26:131-140 (1986); Burdick et al., Thrombosis Res. 45:413-419 (1987); Humphrey et al., Fibrinolysis 5:71-79 (1991); Schaub, Prostaglandins 35:467-474 (1988).

[0235] 4.10.11 Cancer Diagnosis and Therapy

[0236] Polypeptides of the invention may be involved in cancer cell generation, proliferation or metastasis. Detection of the presence or amount of polynucleotides or polypeptides of the invention may be useful for the diagnosis and/or prognosis of one or more types of cancer. For example, the presence or increased expression of a polynucleotide/polypeptide of the invention may indicate a hereditary risk of cancer, a precancerous condition, or an ongoing malignancy. Conversely, a defect in the gene or absence of the polypeptide may be associated with a cancer condition. Identification of single nucleotide polymorphisms associated with cancer or a predisposition to cancer may also be useful for diagnosis or prognosis.

[0237] Cancer treatments promote tumor regression by inhibiting tumor cell proliferation, inhibiting angiogenesis (growth of new blood vessels that is necessary to support tumor growth) and/or prohibiting metastasis by reducing tumor cell motility or invasiveness. Therapeutic compositions of the invention may be effective in adult and pediatric oncology including in solid phase tumors/malignancies, locally advanced tumors, human soft tissue sarcomas, metastatic cancer, including lymphatic metastases, blood cell malignancies including multiple myeloma, acute and chronic leukemias, and lymphomas, head and neck cancers including mouth cancer, larynx cancer and thyroid cancer, lung cancers including small cell carcinoma and non-small cell cancers, breast cancers including small cell carcinoma and ductal carcinoma, gastrointestinal cancers including esophageal cancer, stomach cancer, colon cancer, colorectal cancer and polyps associated with colorectal neoplasia, pancreatic cancers, liver cancer, urologic cancers including bladder cancer and prostate cancer, malignancies of the female genital tract including ovarian carcinoma, uterine (including endometrial) cancers, and solid tumor in the ovarian follicle, kidney cancers including renal cell carcinoma, brain cancers including intrinsic brain tumors, neuroblastoma, astrocytic brain tumors, gliomas, metastatic tumor cell invasion in the central nervous system, bone cancers including osteomas, skin cancers including malignant melanoma, tumor progression of human skin keratinocytes, squamous cell carcinoma, basal cell carcinoma, hemangiopericytoma and Karposi's sarcoma.

[0238] Polypeptides, polynucleotides, or modulators of polypeptides of the invention (including inhibitors and stimulators of the biological activity of the polypeptide of the invention) may be administered to treat cancer. Therapeutic compositions can be administered in therapeutically effective dosages alone or in combination with adjuvant cancer therapy such as surgery, chemotherapy, radiotherapy, thermotherapy, and laser therapy, and may provide a beneficial effect, e.g. reducing tumor size, slowing rate of tumor growth, inhibiting metastasis, or otherwise improving overall clinical condition, without necessarily eradicating the cancer.

[0239] The composition can also be administered in therapeutically effective amounts as a portion of an anti-cancer cocktail. An anti-cancer cocktail is a mixture of the polypeptide or modulator of the invention with one or more anti-cancer drugs in addition to a pharmaceutically acceptable carrier for delivery. The use of anti-cancer cocktails as a cancer treatment is routine. Anti-cancer drugs that are well known in the art and can be used as a treatment in combination with the polypeptide or modulator of the invention include: Actinomycin D, Aminoglutethimide, Asparaginase, Bleomycin, Busulfan, Carboplatin, Carmustine, Chlorambucil, Cisplatin (cis-DDP), Cyclophosphamide, Cytarabine HCl (Cytosine arabinoside), Dacarbazine, Dactinomycin, Daunorubicin HCl, Doxorubicin HCl, Estramustine phosphate sodium, Etoposide (V16-213), Floxuridine, 5-Fluorouracil (5-Fu), Flutamide, Hydroxyurea (hydroxycarbamide), Ifosfamide, Interferon Alpha-2a, Interferon Alpha-2b, Leuprolide acetate (LHRH-releasing factor analog), Lomustine, Mechlorethamine HCl (nitrogen mustard), Melphalan, Mercaptopurine, Mesna, Methotrexate (MTX), Mitomycin, Mitoxantrone HCl, Octreotide, Plicamycin, Procarbazine HCl, Streptozocin, Tamoxifen citrate, Thioguanine, Thiotepa, Vinblastine sulfate, Vincristine sulfate, Amsacrine, Azacitidine, Hexamethylmelamine, Interleukin-2, Mitoguazone, Pentostatin, Semustine, Teniposide, and Vindesine sulfate.

[0240] In addition, therapeutic compositions of the invention may be used for prophylactic treatment of cancer. There are hereditary conditions and/or environmental situations (e.g. exposure to carcinogens) known in the art that predispose an individual to developing cancers. Under these circumstances, it may be beneficial to treat these individuals with therapeutically effective doses of the polypeptide of the invention to reduce the risk of developing cancers.

[0241] In vitro models can be used to determine the effective doses of the polypeptide of the invention as a potential cancer treatment. These in vitro models include proliferation assays of cultured tumor cells, growth of cultured tumor cells in soft agar (see Freshney, (1987) Culture of Animal Cells: A Manual of Basic Technique, Wily-Liss, New York, N.Y. Ch 18 and Ch 21), tumor systems in nude mice as described in Giovanella et al., J. Natl. Can. Inst., 52: 921-30 (1974), mobility and invasive potential of tumor cells in Boyden Chamber assays as described in Pilkington et al., Anticancer Res., 17: 4107-9 (1997), and angiogenesis assays such as induction of vascularization of the chick chorioallantoic membrane or induction of vascular endothelial cell migration as described in Ribatta et al., Intl. J. Dev. Biol., 40: 1189-97 (1999) and Li et al., Clin. Exp. Metastasis, 17:423-9 (1999), respectively. Suitable tumor cells lines are available, e.g. from American Type Tissue Culture Collection catalogs.

[0242] 4.10.12 Immunotargeting of ARP-like Polypeptide

[0243] 4.10.12.1 Targeting Using Arp-like Vaccines

[0244] One embodiment the present invention provides a vaccine comprising an ARP-like polypeptide which can stimulate the immune system against ARP-like polypeptides, thus targeting ARP-like-expressing cells. Use of a tumor antigen in a vaccine for generating cellular and humoral immunity for the purpose of anti-cancer therapy is well known in the art. For example, one type of tumor-specific vaccine uses purified idiotype protein isolated from tumor cells, coupled to keyhole limpet hemocyanin (KLH) and mixed with adjuvant for injection into patients with low-grade follicular lymphoma (Hsu, et al., Blood 89: 3129-3135 (1997)). U.S. Pat. No. 6,312,718 describes methods for inducing immune responses against malignant B cells, in particular lymphoma, chronic lymphocytic leukemia, and multiple myeloma. The methods described therein utilize vaccines that include liposomes having (1) at least one B-cell malignancy-associated antigen, (2) IL-2 alone, or in combination with at least one other cytokine or chemokine, and (3) at least one lipid molecule. Methods of vaccinating against ARP-like polypeptides typically employ an ARP-like polypeptide, including fragments, analogs and variants.

[0245] As another example, dendritic cells, one type of antigen-presenting cell, can be used in a cellular vaccine in which the dendritic cells are isolated from the patient, co-cultured with tumor antigen and then reinfused as a cellular vaccine (Hsu, et al., Nat. Med. 2:52-58 (1996)).

[0246] 4.10.12.2 Targeting Using Arp-like Nucleic Acids

[0247] However, in another embodiment, a nucleic acid encoding an ARP-like polypeptide, or encoding a fragment, analog or variant thereof, within a recombinant vector is utilized. Such methods are known in the art. For example, immune responses can be induced by injection of naked DNA. Plasmid DNA that expresses bicistronic mRNA encoding both the light and heavy chains of tumor idiotype proteins, such as those from B cell lymphoma, when injected into mice, are able to generate a protective, anti-tumor response (Singh, et al., Vaccine 20:1400-1411 (2002)). ARP-like viral vectors are particularly useful for delivering ARP-like-encoding nucleic acids to cells. Examples of vectors include those derived from influenza, adenovirus, vaccinia, herpes symplex virus, fowlpox, vesicular stomatitis virus, canarypox, poliovirus, adeno-associated virus, and lentivirus and sindbus virus. Of course, non-viral vectors, such as liposomes or even naked DNA, are also useful for delivering ARP-like-encoding nucleic acids to cells.

[0248] Combining this type of therapy with other types of therapeutic agents or treatments such as chemotherapy or radiation is also contemplated.

[0249] In a further embodiment, a vector comprising a nucleic acid encoding the ARP-like polypeptide (including a fragment, analog or variant) is introduced into a cell, such as a dendritic cell or a macrophage. When expressed in an antigen-presenting cell, ARP-like antigens are presented to T cells eliciting an immune response against ARP-like polypeptide. Such methods are also known in the art. Methods of introducing tumor antigens into antigen presenting cells and vectors useful therefor are described in U.S. Pat. No. 6,300,090. The vector encoding ARP-like polypeptide may be introduced into the antigen presenting cells in vivo. Alternatively, antigen-presenting cells are loaded with ARP-like polypeptide or a nucleic acid encoding ARP-like polypeptide ex vivo and then introduced into a patient to elicit an immune response against ARP-like polypeptide. In another alternative, the cells presenting ARP-like antigen are used to stimulate the expansion of anti-ARP-like cytotoxic T lymphocytes (CTL) ex vivo followed by introduction of the stimulated CTL into a patient. (U.S. Pat. No. 6,306,388)

[0250] Combining this type of therapy with other types of therapeutic agents or treatments such as chemotherapy or radiation is also contemplated.

[0251] 4.10.12.3 Anti-ARP-like Antibodies

[0252] Alternatively, immunotargeting involves the administration of components of the immune system, such as antibodies, antibody fragments, or primed cells of the immune system against the target. Methods of immunotargeting cancer cells using antibodies or antibody fragments are well known in the art. U.S. Pat. No. 6,306,393 describes the use of anti-CD22 antibodies in the immunotherapy of B-cell malignancies, and U.S. Pat. No. 6,329,503 describes immunotargeting of cells that express serpentine transmembrane antigens.

[0253] ARP-like antibodies (including humanized or human monoclonal antibodies or fragments or other modifications thereof, optionally conjugated to cytotoxic agents) may be introduced into a patient such that the antibody binds to ARP-like protein expressed by cancer cells and mediates the destruction of the cells and the tumor and/or inhibits the growth of the cells or the tumor. Without intending to limit the disclosure, mechanisms by which such antibodies can exert a therapeutic effect may include complement-mediated cytolysis, antibody-dependent cellular cytotoxicity (ADCC), modulating the physiologic function of ARP-like protein, inhibiting binding or signal transduction pathways, modulating tumor cell differentiation, altering tumor angiogenesis factor profiles, modulating the secretion of immune stimulating or tumor suppressing cytokines and growth factors, modulating cellular adhesion, and/or by inducing apoptosis. ARP-like antibodies conjugated to toxic or therapeutic agents, such as radioligands or cytosolic toxins, may also be used therapeutically to deliver the toxic or therapeutic agent directly to ARP-like protein-bearing tumor cells.

[0254] ARP-like antibodies may be used to suppress the immune system in patients receiving organ transplants or in patients with autoimmune diseases such as arthritis. Healthy immune cells would be targeted by these antibodies leading their death and clearance from the system, thus suppressing the immune system.

[0255] ARP-like antibodies may be used as antibody therapy for solid tumors which express this action. Cancer immunotherapy using antibodies provides a novel approach to treating cancers associated with cells that specifically express the ARP-like protein. ARP-like antibody therapy may be particularly appropriate in advanced or metastatic cancers. Combining the antibody therapy method with a chemotherapeutic, radiation or surgical regimen may be preferred in patients that have not received chemotherapeutic treatment, whereas treatment with the antibody therapy may be indicated for patients who have received one or more chemotherapies. Additionally, antibody therapy can also enable the use of reduced dosages of concomitant chemotherapy, particularly in patients that do not tolerate the toxicity of the chemotherapeutic agent very well. Furthermore, treatment of cancer patients with ARP-like antibody with tumors resistant to chemotherapeutic agents might induce sensitivity and responsiveness to these agents in combination.

[0256] Prior to anti-ARP-like immunotargeting, a patient may be evaluated for the presence and level of ARP-like expression by the cancer cells, preferably using immunohistochemical assessments of tumor tissue, quantitative ARP-like imaging, quantitative RT-PCR, or other techniques capable of reliably indicating the presence and degree of ARP-like expression. For example, a blood or biopsy sample may be evaluated by immunohistochemical methods to determine the presence of ARP-like-expressing cells or to determine the extent of ARP-like expression on the surface of the cells within the sample. Methods for immunohistochemical analysis of tumor tissues or released fragments of ARP-like in the serum are well known in the art.

[0257] Anti-ARP-like antibodies useful in treating cancers include those, which are capable of initiating a potent immune response against the tumor and those, which are capable of direct cytotoxicity. In this regard, anti-ARP-like mAbs may elicit tumor cell lysis by either complement-mediated or ADCC mechanisms, both of which require an intact Fc portion of the immunoglobulin molecule for interaction with effector cell Fc receptor sites or complement proteins. In addition, anti-ARP-like antibodies that exert a direct biological effect on tumor growth are useful in the practice of the invention. Potential mechanisms by which such directly cytotoxic antibodies may act include inhibition of cell growth, modulation of cellular differentiation, modulation of tumor angiogenesis factor profiles, and the induction of apoptosis. The mechanism by which a particular anti-ARP-like antibody exerts an anti-tumor effect may be evaluated using any number of in vitro assays designed to determine ADCC, complement-mediated cell lysis, and so forth, as is generally known in the art.

[0258] The anti-tumor activity of a particular anti-ARP-like antibody, or combination of anti-ARP-like antibody, may be evaluated in vivo using a suitable animal model. For example, xenogenic lymphoma cancer models wherein human lymphoma cells are introduced into immune compromised animals, such as nude or SCID mice. Efficacy may be predicted using assays, which measure inhibition of tumor formation, tumor regression or metastasis, and the like.

[0259] It should be noted that the use of murine or other non-human monoclonal antibodies, human/mouse chimeric mAbs may induce moderate to strong immune responses in some patients. In the most severe cases, such an immune response may lead to the extensive formation of immune complexes, which, potentially, can cause renal failure. Accordingly, preferred monoclonal antibodies used in the practice of the therapeutic methods of the invention are those which are either fully human or humanized and which bind specifically to the target ARP-like antigen with high affinity but exhibit low or no antigenicity in the patient.

[0260] The method of the invention contemplates the administration of single anti-ARP-like monoclonal antibodies (mAbs) as well as combinations, or “cocktails”, of different mAbs. Two or more monoclonal antibodies that bind to ARP-like protein may provide an improved effect compared to a single antibody. Alternatively, a combination of an anti-ARP-like antibody with an antibody that binds a different antigen may provide an improved effect compared to a single antibody. Such mAb cocktails may have certain advantages inasmuch as they contain mAbs, which exploit different effector mechanisms or combine directly cytotoxic mAbs with mAbs that rely on immune effector functionality. Such mAbs in combination may exhibit synergistic therapeutic effects. In addition, the administration of anti-ARP-like mAbs may be combined with other therapeutic agents, including but not limited to various chemotherapeutic agents, androgen-blockers, and immune modulators (e.g., IL-2, GM-CSF). The anti-ARP-like mAbs may be administered in their “naked” or unconjugated form, or may have therapeutic agents conjugated to them. Additionally, bispecific antibodies may be used. Such an antibody would have one antigenic binding domain specific for ARP-like and the other antigenic binding domain specific for another antigen (such as CD20 for example). Finally, Fab ARP-like antibodies or fragments of these antibodies (including fragments conjugated to other protein sequences or toxins) may also be used as therapeutic agents.

[0261] 4.10.13 Receptor/Ligand Activity

[0262] A polypeptide of the present invention may also demonstrate activity as receptor, receptor ligand or inhibitor or agonist of receptor/ligand interactions. A polynucleotide of the invention can encode a polypeptide exhibiting such characteristics. Examples of such receptors and ligands include, without limitation, cytokine receptors and their ligands, receptor kinases and their ligands, receptor phosphatases and their ligands, receptors involved in cell-cell interactions and their ligands (including without limitation, cellular adhesion molecules (such as selectins, integrins and their ligands) and receptor/ligand pairs involved in antigen presentation, antigen recognition and development of cellular and humoral immune responses. Receptors and ligands are also useful for screening of potential peptide or small molecule inhibitors of the relevant receptor/ligand interaction. A protein of the present invention (including, without limitation, fragments of receptors and ligands) may themselves be useful as inhibitors of receptor/ligand interactions.

[0263] The activity of a polypeptide of the invention may, among other means, be measured by the following methods:

[0264] Suitable assays for receptor-ligand activity include without limitation those described in: Current Protocols in Immunology, Ed by J. E. Coligan, A. M. Kruisbeek, D. H. Margulies, E. M. Shevach, W. Strober, Pub. Greene Publishing Associates and Wiley- Interscience (Chapter 7.28, Measurement of Cellular Adhesion under static conditions 7.28.1-7.28.22), Takai et al., Proc. Natl. Acad. Sci. USA 84:6864-6868 (1987); Bierer et al., J. Exp. Med. 168:1145-1156 (1988); Rosenstein et al., J. Exp. Med. 169:149-160 (1989); Stoltenborg et al., J. Immunol. Methods 175:59-68 (1994); Stitt et al., Cell 80:661-670 (1995).

[0265] By way of example, the polypeptides of the invention may be used as a receptor for a ligand(s) thereby transmitting the biological activity of that ligand(s). Ligands may be identified through binding assays, affinity chromatography, dihybrid screening assays, BIAcore assays, gel overlay assays, or other methods known in the art.

[0266] Studies characterizing drugs or proteins as agonist or antagonist or partial agonists or a partial antagonist require the use of other proteins as competing ligands. The polypeptides of the present invention or ligand(s) thereof may be labeled by being coupled to radioisotopes, colorimetric molecules or toxin molecules by conventional methods. (“Guide to Protein Purification” Murray P. Deutscher (ed) Methods in Enzymology Vol. 182 (1990) Academic Press, Inc. San Diego). Examples of radioisotopes include, but are not limited to, tritium and carbon-14. Examples of colorimetric molecules include, but are not limited to, fluorescent molecules such as fluorescamine, or rhodamine or other colorimetric molecules. Examples of toxins include, but are not limited, to ricin.

[0267] 4.10.14 Drug Screening

[0268] This invention is particularly useful for screening chemical compounds by using the novel polypeptides or binding fragments thereof in any of a variety of drug screening techniques. The polypeptides or fragments employed in such a test may either be free in solution, affixed to a solid support, borne on a cell surface or located intracellularly. One method of drug screening utilizes eukaryotic or prokaryotic host cells which are stably transformed with recombinant nucleic acids expressing the polypeptide or a fragment thereof. Drugs are screened against such transformed cells in competitive binding assays. Such cells, either in viable or fixed form, can be used for standard binding assays. One may measure, for example, the formation of complexes between polypeptides of the invention or fragments and the agent being tested or examine the diminution in complex formation between the novel polypeptides and an appropriate cell line, which are well known in the art.

[0269] Sources for test compounds that may be screened for ability to bind to or modulate (i.e., increase or decrease) the activity of polypeptides of the invention include (1) inorganic and organic chemical libraries, (2) natural product libraries, and (3) combinatorial libraries comprised of either random or mimetic peptides, oligonucleotides or organic molecules.

[0270] Chemical libraries may be readily synthesized or purchased from a number of commercial sources, and may include structural analogs of known compounds or compounds that are identified as “hits” or “leads” via natural product screening.

[0271] The sources of natural product libraries are microorganisms (including bacteria and fungi), animals, plants or other vegetation, or marine organisms, and libraries of mixtures for screening may be created by: (1) fermentation and extraction of broths from soil, plant or marine microorganisms or (2) extraction of the organisms themselves. Natural product libraries include polyketides, non-ribosomal peptides, and (non-naturally occurring) variants thereof. For a review, see Science 282:63-68 (1998).

[0272] Combinatorial libraries are composed of large numbers of peptides, oligonucleotides or organic compounds and can be readily prepared by traditional automated synthesis methods, PCR, cloning or proprietary synthetic methods. Of particular interest are peptide and oligonucleotide combinatorial libraries. Still other libraries of interest include peptide, protein, peptidomimetic, multiparallel synthetic collection, recombinatorial, and polypeptide libraries. For a review of combinatorial chemistry and libraries created therefrom, see Myers, Curr. Opin. Biotechnol. 8:701-707 (1997). For reviews and examples of peptidomimetic libraries, see Al-Obeidi et al., Mol. Biotechnol, 9:205-23 (1998); Hruby et al., Curr Opin Chem Biol, 1:114-19 (1997); Dorner et al., Bioorg Med Chem, 4:709-15 (1996) (alkylated dipeptides).

[0273] Identification of modulators through use of the various libraries described herein permits modification of the candidate “hit” (or “lead”) to optimize the capacity of the “hit” to bind a polypeptide of the invention. The molecules identified in the binding assay are then tested for antagonist or agonist activity in in vivo tissue culture or animal models that are well known in the art. In brief, the molecules are titrated into a plurality of cell cultures or animals and then tested for either cell/animal death or prolonged survival of the animal/cells.

[0274] The binding molecules thus identified may be complexed with toxins, e.g., ricin or cholera, or with other compounds that are toxic to cells such as radioisotopes. The toxin-binding molecule complex is then targeted to a tumor or other cell by the specificity of the binding molecule for a polypeptide of the invention. Alternatively, the binding molecules may be complexed with imaging agents for targeting and imaging purposes.

[0275] 4.10.15 Assay for Receptor Activity

[0276] The invention also provides methods to detect specific binding of a polypeptide e.g. a ligand or a receptor. The art provides numerous assays particularly useful for identifying previously unknown binding partners for receptor polypeptides of the invention. For example, expression cloning using mammalian or bacterial cells, or dihybrid screening assays can be used to identify polynucleotides encoding binding partners. As another example, affinity chromatography with the appropriate immobilized polypeptide of the invention can be used to isolate polypeptides that recognize and bind polypeptides of the invention. There are a number of different libraries used for the identification of compounds, and in particular small molecules, that modulate (i.e., increase or decrease) biological activity of a polypeptide of the invention. Ligands for receptor polypeptides of the invention can also be identified by adding exogenous ligands, or cocktails of ligands to two cells populations that are genetically identical except for the expression of the receptor of the invention: one cell population expresses the receptor of the invention whereas the other does not. The response of the two cell populations to the addition of ligands(s) is then compared. Alternatively, an expression library can be co-expressed with the polypeptide of the invention in cells and assayed for an autocrine response to identify potential ligand(s). As still another example, BIAcore assays, gel overlay assays, or other methods known in the art can be used to identify binding partner polypeptides, including, (1) organic and inorganic chemical libraries, (2) natural product libraries, and (3) combinatorial libraries comprised of random peptides, oligonucleotides or organic molecules.

[0277] The role of downstream intracellular signaling molecules in the signaling cascade of the polypeptide of the invention can be determined. For example, a chimeric protein in which the cytoplasmic domain of the polypeptide of the invention is fused to the extracellular portion of a protein, whose ligand has been identified, is produced in a host cell. The cell is then incubated with the ligand specific for the extracellular portion of the chimeric protein, thereby activating the chimeric receptor. Known downstream proteins involved in intracellular signaling can then be assayed for expected modifications i.e. phosphorylation. Other methods known to those in the art can also be used to identify signaling molecules involved in receptor activity.

[0278] 4.10.16 Anti-Inflammatory Activity

[0279] Compositions of the present invention may also exhibit anti-inflammatory activity. The anti-inflammatory activity may be achieved by providing a stimulus to cells involved in the inflammatory response, by inhibiting or promoting cell-cell interactions (such as, for example, cell adhesion), by inhibiting or promoting chemotaxis of cells involved in the inflammatory process, inhibiting or promoting cell extravasation, or by stimulating or suppressing production of other factors which more directly inhibit or promote an inflammatory response. Compositions with such activities can be used to treat inflammatory conditions including chronic or acute conditions), including without limitation intimation associated with infection (such as septic shock, sepsis or systemic inflammatory response syndrome (SIRS)), ischemia-reperfusion injury, endotoxin lethality, arthritis, complement-mediated hyperacute rejection, nephritis, cytokine or chemokine-induced lung injury, inflammatory bowel disease, Crohn's disease or resulting from over production of cytokines such as TNF or IL-1. Compositions of the invention may also be useful to treat anaphylaxis and hypersensitivity to an antigenic substance or material. Compositions of this invention may be utilized to prevent or treat conditions such as, but not limited to, sepsis, acute pancreatitis, endotoxin shock, cytokine induced shock, rheumatoid arthritis, chronic inflammatory arthritis, pancreatic cell damage from diabetes mellitus type 1, graft versus host disease, inflammatory bowel disease, inflamation associated with pulmonary disease, other autoimmune disease or inflammatory disease, an antiproliferative agent such as for acute or chronic mylegenous leukemia or in the prevention of premature labor secondary to intrauterine infections.

[0280] 4.10.17 Leukemias

[0281] Leukemias and related disorders may be treated or prevented by administration of a therapeutic that promotes or inhibits function of the polynucleotides and/or polypeptides of the invention. Such leukemias and related disorders include but are not limited to acute leukemia, acute lymphocytic leukemia, acute myelocytic leukemia, myeloblastic, promyelocytic, myelomonocytic, monocytic, erythroleukemia, chronic leukemia, chronic myelocytic (granulocytic) leukemia and chronic lymphocytic leukemia (for a review of such disorders, see Fishman et al., 1985, Medicine, 2d Ed., J. B. Lippincott Co., Philadelphia).

[0282] 4.10.18 Nervous System Disorders

[0283] Nervous system disorders, involving cell types which can be tested for efficacy of intervention with compounds that modulate the activity of the polynucleotides and/or polypeptides of the invention, and which can be treated upon thus observing an indication of therapeutic utility, include but are not limited to nervous system injuries, and diseases or disorders which result in either a disconnection of axons, a diminution or degeneration of neurons, or demyelination. Nervous system lesions which may be treated in a patient (including human and non-human mammalian patients) according to the invention include but are not limited to the following lesions of either the central (including spinal cord, brain) or peripheral nervous systems:

[0284] (i) traumatic lesions, including lesions caused by physical injury or associated with surgery, for example, lesions which sever a portion of the nervous system, or compression injuries;

[0285] (ii) ischemic lesions, in which a lack of oxygen in a portion of the nervous system results in neuronal injury or death, including cerebral infarction or ischemia, or spinal cord infarction or ischemia;

[0286] (iii) infectious lesions, in which a portion of the nervous system is destroyed or injured as a result of infection, for example, by an abscess or associated with infection by human immunodeficiency virus, herpes zoster, or herpes simplex virus or with Lyme disease, tuberculosis, syphilis;

[0287] (iv) degenerative lesions, in which a portion of the nervous system is destroyed or injured as a result of a degenerative process including but not limited to degeneration associated with Parkinson's disease, Alzheimer's disease, Huntington's chorea, or amyotrophic lateral sclerosis;

[0288] (v) lesions associated with nutritional diseases or disorders, in which a portion of the nervous system is destroyed or injured by a nutritional disorder or disorder of metabolism including but not limited to, vitamin B12 deficiency, folic acid deficiency, Wernicke disease, tobacco-alcohol amblyopia, Marchiafava-Bignami disease (primary degeneration of the corpus callosum), and alcoholic cerebellar degeneration;

[0289] (vi) neurological lesions associated with systemic diseases including but not limited to diabetes (diabetic neuropathy, Bell's palsy), systemic lupus erythematosus, carcinoma, or sarcoidosis;

[0290] (vii) lesions caused by toxic substances including alcohol, lead, or particular neurotoxins; and

[0291] (viii) demyelinated lesions in which a portion of the nervous system is destroyed or injured by a demyelinating disease including but not limited to multiple sclerosis, human immunodeficiency virus-associated myelopathy, transverse myelopathy or various etiologies, progressive multifocal leukoencephalopathy, and central pontine myelinolysis.

[0292] Therapeutics which are useful according to the invention for treatment of a nervous system disorder may be selected by testing for biological activity in promoting the survival or differentiation of neurons. For example, and not by way of limitation, therapeutics which elicit any of the following effects may be useful according to the invention:

[0293] (i) increased survival time of neurons in culture;

[0294] (ii) increased sprouting of neurons in culture or in vivo;

[0295] (iii) increased production of a neuron-associated molecule in culture or in vivo, e.g., choline acetyltransferase or acetylcholinesterase with respect to motor neurons; or

[0296] (iv) decreased symptoms of neuron dysfunction in vivo.

[0297] Such effects may be measured by any method known in the art. In preferred, non-limiting embodiments, increased survival of neurons may be measured by the method set forth in Arakawa et al. (J. Neurosci. 10:3507-3515 (1990)); increased sprouting of neurons may be detected by methods set forth in Pestronk et al. (Exp. Neurol. 70:65-82 (1980)) or Brown et al. (Ann. Rev. Neurosci. 4:17-42 (1981)); increased production of neuron-associated molecules may be measured by bioassay, enzymatic assay, antibody binding, Northern blot assay, etc., depending on the molecule to be measured; and motor neuron dysfunction may be measured by assessing the physical manifestation of motor neuron disorder, e.g., weakness, motor neuron conduction velocity, or functional disability.

[0298] In specific embodiments, motor neuron disorders that may be treated according to the invention include but are not limited to disorders such as infarction, infection, exposure to toxin, trauma, surgical damage, degenerative disease or malignancy that may affect motor neurons as well as other components of the nervous system, as well as disorders that selectively affect neurons such as amyotrophic lateral sclerosis, and including but not limited to progressive spinal muscular atrophy, progressive bulbar palsy, primary lateral sclerosis, infantile and juvenile muscular atrophy, progressive bulbar paralysis of childhood (Fazio-Londe syndrome), poliomyelitis and the post polio syndrome, and Hereditary Motorsensory Neuropathy (Charcot-Marie-Tooth Disease).

[0299] 4.10.19 Other Activities

[0300] A polypeptide of the invention may also exhibit one or more of the following additional activities or effects: inhibiting the growth, infection or function of, or killing, infectious agents, including, without limitation, bacteria, viruses, fungi and other parasites; effecting (suppressing or enhancing) bodily characteristics, including, without limitation, height, weight, hair color, eye color, skin, fat to lean ratio or other tissue pigmentation, or organ or body part size or shape (such as, for example, breast augmentation or diminution, change in bone form or shape); effecting biorhythms or circadian cycles or rhythms; effecting the fertility of male or female subjects; effecting the metabolism, catabolism, anabolism, processing, utilization, storage or elimination of dietary fat, lipid, protein, carbohydrate, vitamins, minerals, co-factors or other nutritional factors or component(s); effecting behavioral characteristics, including, without limitation, appetite, libido, stress, cognition (including cognitive disorders), depression (including depressive disorders) and violent behaviors; providing analgesic effects or other pain reducing effects; promoting differentiation and growth of embryonic stem cells in lineages other than hematopoietic lineages; hormonal or endocrine activity; in the case of enzymes, correcting deficiencies of the enzyme and treating deficiency-related diseases; treatment of hyperproliferative disorders (such as, for example, psoriasis); immunoglobulin-like activity (such as, for example, the ability to bind antigens or complement); and the ability to act as an antigen in a vaccine composition to raise an immune response against such protein or another material or entity which is cross-reactive with such protein.

[0301] 4.10.20 Identification of Polymorphisms

[0302] The demonstration of polymorphisms makes possible the identification of such polymorphisms in human subjects and the pharmacogenetic use of this information for diagnosis and treatment. Such polymorphisms may be associated with, e.g., differential predisposition or susceptibility to various disease states (such as disorders involving inflammation or immune response) or a differential response to drug administration, and this genetic information can be used to tailor preventive or therapeutic treatment appropriately. For example, the existence of a polymorphism associated with a predisposition to inflammation or autoimmune disease makes possible the diagnosis of this condition in humans by identifying the presence of the polymorphism.

[0303] Polymorphisms can be identified in a variety of ways known in the art which all generally involve obtaining a sample from a patient, analyzing DNA from the sample, optionally involving isolation or amplification of the DNA, and identifying the presence of the polymorphism in the DNA. For example, PCR may be used to amplify an appropriate fragment of genomic DNA which may then be sequenced. Alternatively, the DNA may be subjected to allele-specific oligonucleotide hybridization (in which appropriate oligonucleotides are hybridized to the DNA under conditions permitting detection of a single base mismatch) or to a single nucleotide extension assay (in which an oligonucleotide that hybridizes immediately adjacent to the position of the polymorphism is extended with one or more labeled nucleotides). In addition, traditional restriction fragment length polymorphism analysis (using restriction enzymes that provide differential digestion of the genomic DNA depending on the presence or absence of the polymorphism) may be performed. Arrays with nucleotide sequences of the present invention can be used to detect polymorphisms. The array can comprise modified nucleotide sequences of the present invention in order to detect the nucleotide sequences of the present invention. In the alternative, any one of the nucleotide sequences of the present invention can be placed on the array to detect changes from those sequences.

[0304] Alternatively a polymorphism resulting in a change in the amino acid sequence could also be detected by detecting a corresponding change in amino acid sequence of the protein, e.g., by an antibody specific to the variant sequence.

[0305] 4.10.21 Arthritis and Inflammation

[0306] The immunosuppressive effects of the compositions of the invention against rheumatoid arthritis are determined in an experimental animal model system. The experimental model system is adjuvant induced arthritis in rats, and the protocol is described by J. Holoshitz, et al., Science, 219:56 (1983), or by B. Waksman et al., Int. Arch. Allergy Appl. Immunol., 23:129 (1963). Induction of the disease can be caused by a single injection, generally intradermally, of a suspension of killed Mycobacterium tuberculosis in complete Freund's adjuvant (CFA). The route of injection can vary, but rats may be injected at the base of the tail with an adjuvant mixture. The polypeptide is administered in phosphate buffered solution (PBS) at a dose of about 1-5 mg/kg. The control consists of administering PBS only.

[0307] The procedure for testing the effects of the test compound would consist of intradermally injecting killed Mycobacterium tuberculosis in CFA followed by immediately administering the test compound and subsequent treatment every other day until day 24. At 14, 15, 18, 20, 22, and 24 days after injection of Mycobacterium CFA, an overall arthritis score may be obtained as described by J. Holoskitz above. An analysis of the data would reveal that the test compound would have a dramatic affect on the swelling of the joints as measured by a decrease of the arthritis score.

[0308] 4.11 Therapeutic Methods

[0309] The compositions (including polypeptide fragments, analogs, variants and antibodies or other binding partners or modulators including antisense polynucleotides) of the invention have numerous applications in a variety of therapeutic methods. Examples of therapeutic applications include, but are not limited to, those exemplified herein.

[0310] 4.11.1 Example

[0311] One embodiment of the invention is the administration of an effective amount of the polypeptides or other composition of the invention to individuals affected by a disease or disorder that can be modulated by regulating the peptides of the invention. While the mode of administration is not particularly important, parenteral administration is preferred. An exemplary mode of administration is to deliver an intravenous bolus. The dosage of the polypeptides or other composition of the invention will normally be determined by the prescribing physician. It is to be expected that the dosage will vary according to the age, weight, condition and response of the individual patient. Typically, the amount of polypeptide administered per dose will be in the range of about 0.01 μg/kg to 100 mg/kg of body weight, with the preferred dose being about 0.11 μg/kg to 10 mg/kg of patient body weight. For parenteral administration, polypeptides of the invention will be formulated in an injectable form combined with a pharmaceutically acceptable parenteral vehicle. Such vehicles are well known in the art and examples include water, saline, Ringer's solution, dextrose solution, and solutions consisting of small amounts of the human serum albumin. The vehicle may contain minor amounts of additives that maintain the isotonicity and stability of the polypeptide or other active ingredient. The preparation of such solutions is within the skill of the art.

[0312] 4.12 Pharmaceutical Formulations and Routes of Administration

[0313] A protein or other composition of the present invention (from whatever source derived, including without limitation from recombinant and non-recombinant sources and including antibodies and other binding partners of the polypeptides of the invention) may be administered to a patient in need, by itself, or in pharmaceutical compositions where it is mixed with suitable carriers or excipient(s) at doses to treat or ameliorate a variety of disorders. Such a composition may optionally contain (in addition to protein or other active ingredient and a carrier) diluents, fillers, salts, buffers, stabilizers, solubilizers, and other materials well known in the art. The term “pharmaceutically acceptable” means a non-toxic material that does not interfere with the effectiveness of the biological activity of the active ingredient(s). The characteristics of the carrier will depend on the route of administration. The pharmaceutical composition of the invention may also contain cytokines, lymphokines, or other hematopoietic factors such as M-CSF, GM-CSF, TNF, IL-1, IL-2, IL-3, IL-4, IL-5, IL-6, IL-7, IL-8, IL-9, IL-10, IL-11, IL-12, IL-13, IL-14, IL-15, IFN, TNF0, TNF1, TNF2, G-CSF, Meg-CSF, thrombopoietin, stem cell factor, and erythropoietin. In further compositions, proteins of the invention may be combined with other agents beneficial to the treatment of the disease or disorder in question. These agents include various growth factors such as epidermal growth factor (EGF), platelet-derived growth factor (PDGF), transforming growth factors (TGF-α and TGF-β), insulin-like growth factor (IGF), as well as cytokines described herein.

[0314] The pharmaceutical composition may further contain other agents which either enhance the activity of the protein or other active ingredient or complement its activity or use in treatment. Such additional factors and/or agents may be included in the pharmaceutical composition to produce a synergistic effect with protein or other active ingredient of the invention, or to minimize side effects. Conversely, protein or other active ingredient of the present invention may be included in formulations of the particular clotting factor, cytokine, lymphokine, other hematopoietic factor, thrombolytic or anti-thrombotic factor, or anti-inflammatory agent to minimize side effects of the clotting factor, cytokine, lymphokine, other hematopoietic factor, thrombolytic or anti-thrombotic factor, or anti-inflammatory agent (such as IL-1Ra, IL-1 Hy1, IL-1 Hy2, anti-TNF, corticosteroids, immunosuppressive agents). A protein of the present invention may be active in multimers (e.g., heterodimers or homodimers) or complexes with itself or other proteins. As a result, pharmaceutical compositions of the invention may comprise a protein of the invention in such multimeric or complexed form.

[0315] As an alternative to being included in a pharmaceutical composition of the invention including a first protein, a second protein or a therapeutic agent may be concurrently administered with the first protein (e.g., at the same time, or at differing times provided that therapeutic concentrations of the combination of agents is achieved at the treatment site). Techniques for formulation and administration of the compounds of the instant application may be found in “Remington's Pharmaceutical Sciences,” Mack Publishing Co., Easton, Pa., latest edition. A therapeutically effective dose further refers to that amount of the compound sufficient to result in amelioration of symptoms, e.g., treatment, healing, prevention or amelioration of the relevant medical condition, or an increase in rate of treatment, healing, prevention or amelioration of such conditions. When applied to an individual active ingredient, administered alone, a therapeutically effective dose refers to that ingredient alone. When applied to a combination, a therapeutically effective dose refers to combined amounts of the active ingredients that result in the therapeutic effect, whether administered in combination, serially or simultaneously.

[0316] In practicing the method of treatment or use of the present invention, a therapeutically effective amount of protein or other active ingredient of the present invention is administered to a mammal having a condition to be treated. Protein or other active ingredient of the present invention may be administered in accordance with the method of the invention either alone or in combination with other therapies such as treatments employing cytokines, lymphokines or other hematopoietic factors. When co-administered with one or more cytokines, lymphokines or other hematopoietic factors, protein or other active ingredient of the present invention may be administered either simultaneously with the cytokine(s), lymphokine(s), other hematopoietic factor(s), thrombolytic or anti-thrombotic factors, or sequentially. If administered sequentially, the attending physician will decide on the appropriate sequence of administering protein or other active ingredient of the present invention in combination with cytokine(s), lymphokine(s), other hematopoietic factor(s), thrombolytic or anti-thrombotic factors.

[0317] 4.12.1 Routes of Administration

[0318] Suitable routes of administration may, for example, include oral, rectal, transmucosal, or intestinal administration; parenteral delivery, including intramuscular, subcutaneous, intramedullary injections, as well as intrathecal, direct intraventricular, intravenous, intraperitoneal, intranasal, or intraocular injections. Administration of protein or other active ingredient of the present invention used in the pharmaceutical composition or to practice the method of the present invention can be carried out in a variety of conventional ways, such as oral ingestion, inhalation, topical application or cutaneous, subcutaneous, intraperitoneal, parenteral or intravenous injection. Intravenous administration to the patient is preferred.

[0319] Alternately, one may administer the compound in a local rather than systemic manner, for example, via injection of the compound directly into arthritic joints or in fibrotic tissue, often in a depot or sustained release formulation. In order to prevent the scarring process frequently occurring as complication of glaucoma surgery, the compounds may be administered topically, for example, as eye drops. Furthermore, one may administer the drug in a targeted drug delivery system, for example, in a liposome coated with a specific antibody, targeting, for example, arthritic or fibrotic tissue. The liposomes will be targeted to and taken up selectively by the afflicted tissue.

[0320] The polypeptides of the invention are administered by any route that delivers an effective dosage to the desired site of action. The determination of a suitable route of administration and an effective dosage for a particular indication is within the level of skill in the art. Preferably for wound treatment, one administers the therapeutic compound directly to the site. Suitable dosage ranges for the polypeptides of the invention can be extrapolated from these dosages or from similar studies in appropriate animal models. Dosages can then be adjusted as necessary by the clinician to provide maximal therapeutic benefit.

[0321] 4.12.2 Compositions/Formulations

[0322] Pharmaceutical compositions for use in accordance with the present invention thus may be formulated in a conventional manner using one or more physiologically acceptable carriers comprising excipients and auxiliaries which facilitate processing of the active compounds into preparations which can be used pharmaceutically. These pharmaceutical compositions may be manufactured in a manner that is itself known, e.g., by means of conventional mixing, dissolving, granulating, dragee-making, levigating, emulsifying, encapsulating, entrapping or lyophilizing processes. Proper formulation is dependent upon the route of administration chosen. When a therapeutically effective amount of protein or other active ingredient of the present invention is administered orally, protein or other active ingredient of the present invention will be in the form of a tablet, capsule, powder, solution or elixir. When administered in tablet form, the pharmaceutical composition of the invention may additionally contain a solid carrier such as a gelatin or an adjuvant. The tablet, capsule, and powder contain from about 5 to 95% protein or other active ingredient of the present invention, and preferably from about 25 to 90% protein or other active ingredient of the present invention. When administered in liquid form, a liquid carrier such as water, petroleum, oils of animal or plant origin such as peanut oil, mineral oil, soybean oil, or sesame oil, or synthetic oils may be added. The liquid form of the pharmaceutical composition may further contain physiological saline solution, dextrose or other saccharide solution, or glycols such as ethylene glycol, propylene glycol or polyethylene glycol. When administered in liquid form, the pharmaceutical composition contains from about 0.5 to 90% by weight of protein or other active ingredient of the present invention, and preferably from about 1 to 50% protein or other active ingredient of the present invention.

[0323] When a therapeutically effective amount of protein or other active ingredient of the present invention is administered by intravenous, cutaneous or subcutaneous injection, protein or other active ingredient of the present invention will be in the form of a pyrogen-free, parenterally acceptable aqueous solution. The preparation of such parenterally acceptable protein or other active ingredient solutions, having due regard to pH, isotonicity, stability, and the like, is within the skill in the art. A preferred pharmaceutical composition for intravenous, cutaneous, or subcutaneous injection should contain, in addition to protein or other active ingredient of the present invention, an isotonic vehicle such as Sodium Chloride Injection, Ringer's Injection, Dextrose Injection, Dextrose and Sodium Chloride Injection, Lactated Ringer's Injection, or other vehicle as known in the art. The pharmaceutical composition of the present invention may also contain stabilizers, preservatives, buffers, antioxidants, or other additives known to those of skill in the art. For injection, the agents of the invention may be formulated in aqueous solutions, preferably in physiologically compatible buffers such as Hanks's solution, Ringer's solution, or physiological saline buffer. For transmucosal administration, penetrants appropriate to the barrier to be permeated are used in the formulation. Such penetrants are generally known in the art.

[0324] For oral administration, the compounds can be formulated readily by combining the active compounds with pharmaceutically acceptable carriers well known in the art. Such carriers enable the compounds of the invention to be formulated as tablets, pills, dragees, capsules, liquids, gels, syrups, slurries, suspensions and the like, for oral ingestion by a patient to be treated. Pharmaceutical preparations for oral use can be obtained from a solid excipient, optionally grinding a resulting mixture, and processing the mixture of granules, after adding suitable auxiliaries, if desired, to obtain tablets or dragee cores. Suitable excipients are, in particular, fillers such as sugars, including lactose, sucrose, mannitol, or sorbitol; cellulose preparations such as, for example, maize starch, wheat starch, rice starch, potato starch, gelatin, gum tragacanth, methyl cellulose, hydroxypropylmethyl-cellulose, sodium carboxymethylcellulose, and/or polyvinylpyrrolidone (PVP). If desired, disintegrating agents may be added, such as the cross-linked polyvinyl pyrrolidone, agar, or alginic acid or a salt thereof such as sodium alginate. Dragee cores are provided with suitable coatings. For this purpose, concentrated sugar solutions may be used, which may optionally contain gum arabic, talc, polyvinyl pyrrolidone, carbopol gel, polyethylene glycol, and/or titanium dioxide, lacquer solutions, and suitable organic solvents or solvent mixtures. Dyestuffs or pigments may be added to the tablets or dragee coatings for identification or to characterize different combinations of active compound doses.

[0325] Pharmaceutical preparations which can be used orally include push-fit capsules made of gelatin, as well as soft, sealed capsules made of gelatin and a plasticizer, such as glycerol or sorbitol. The push-fit capsules can contain the active ingredients in a mixture with filler such as lactose, binders such as starches, and/or lubricants such as talc or magnesium stearate and, optionally, stabilizers. In soft capsules, the active compounds may be dissolved or suspended in suitable liquids, such as fatty oils, liquid paraffin, or liquid polyethylene glycols. In addition, stabilizers may be added. All formulations for oral administration should be in dosages suitable for such administration. For buccal administration, the compositions may take the form of tablets or lozenges formulated in conventional manner.

[0326] For administration by inhalation, the compounds for use according to the present invention are conveniently delivered in the form of an aerosol spray presentation from pressurized packs or a nebuliser, with the use of a suitable propellant, e.g., dichlorodifluoromethane, trichlorofluoromethane, dichlorotetrafluoroethane, carbon dioxide or other suitable gas. In the case of a pressurized aerosol the dosage unit may be determined by providing a valve to deliver a metered amount. Capsules and cartridges of, e.g., gelatin for use in an inhaler or insufflator may be formulated containing a powder mix of the compound and a suitable powder base such as lactose or starch. The compounds may be formulated for parenteral administration by injection, e.g., by bolus injection or continuous infusion. Formulations for injection may be presented in unit dosage form, e.g., in ampules or in multi-dose containers, with an added preservative. The compositions may take such forms as suspensions, solutions or emulsions in oily or aqueous vehicles, and may contain formulatory agents such as suspending, stabilizing and/or dispersing agents.

[0327] Pharmaceutical formulations for parenteral administration include aqueous solutions of the active compounds in water-soluble form. Additionally, suspensions of the active compounds may be prepared as appropriate oily injection suspensions. Suitable lipophilic solvents or vehicles include fatty oils such as sesame oil, or synthetic fatty acid esters, such as ethyl oleate or triglycerides, or liposomes. Aqueous injection suspensions may contain substances which increase the viscosity of the suspension, such as sodium carboxymethyl cellulose, sorbitol, or dextran. Optionally, the suspension may also contain suitable stabilizers or agents which increase the solubility of the compounds to allow for the preparation of highly concentrated solutions. Alternatively, the active ingredient may be in powder form for constitution with a suitable vehicle, e.g., sterile pyrogen-free water, before use.

[0328] The compounds may also be formulated in rectal compositions such as suppositories or retention enemas, e.g., containing conventional suppository bases such as cocoa butter or other glycerides. In addition to the formulations described previously, the compounds may also be formulated as a depot preparation. Such long acting formulations may be administered by implantation (for example subcutaneously or intramuscularly) or by intramuscular injection. Thus, for example, the compounds may be formulated with suitable polymeric or hydrophobic materials (for example as an emulsion in an acceptable oil) or ion exchange resins, or as sparingly soluble derivatives, for example, as a sparingly soluble salt.

[0329] A pharmaceutical carrier for the hydrophobic compounds of the invention is a co-solvent system comprising benzyl alcohol, a nonpolar surfactant, a water-miscible organic polymer, and an aqueous phase. The co-solvent system may be the VPD co-solvent system. VPD is a solution of 3% w/v benzyl alcohol, 8% w/v of the nonpolar surfactant polysorbate 80, and 65% w/v polyethylene glycol 300, made up to volume in absolute ethanol. The VPD co-solvent system (VPD:5W) consists of VPD diluted 1:1 with a 5% dextrose in water solution. This co-solvent system dissolves hydrophobic compounds well, and itself produces low toxicity upon systemic administration. Naturally, the proportions of a co-solvent system may be varied considerably without destroying its solubility and toxicity characteristics. Furthermore, the identity of the co-solvent components may be varied: for example, other low-toxicity nonpolar surfactants may be used instead of polysorbate 80; the fraction size of polyethylene glycol may be varied; other biocompatible polymers may replace polyethylene glycol, e.g. polyvinyl pyrrolidone; and other sugars or polysaccharides may substitute for dextrose. Alternatively, other delivery systems for hydrophobic pharmaceutical compounds may be employed. Liposomes and emulsions are well known examples of delivery vehicles or carriers for hydrophobic drugs. Certain organic solvents such as dimethylsulfoxide also may be employed, although usually at the cost of greater toxicity. Additionally, the compounds may be delivered using a sustained-release system, such as semipermeable matrices of solid hydrophobic polymers containing the therapeutic agent. Various types of sustained-release materials have been established and are well known by those skilled in the art. Sustained-release capsules may, depending on their chemical nature, release the compounds for a few weeks up to over 100 days. Depending on the chemical nature and the biological stability of the therapeutic reagent, additional strategies for protein or other active ingredient stabilization may be employed.

[0330] The pharmaceutical compositions also may comprise suitable solid or gel phase carriers or excipients. Examples of such carriers or excipients include but are not limited to calcium carbonate, calcium phosphate, various sugars, starches, cellulose derivatives, gelatin, and polymers such as polyethylene glycols. Many of the active ingredients of the invention may be provided as salts with pharmaceutically compatible counter ions. Such pharmaceutically acceptable base addition salts are those salts which retain the biological effectiveness and properties of the free acids and which are obtained by reaction with inorganic or organic bases such as sodium hydroxide, magnesium hydroxide, ammonia, trialkylamine, dialkylamine, monoalkylamine, dibasic amino acids, sodium acetate, potassium benzoate, triethanol amine and the like.

[0331] The pharmaceutical composition of the invention may be in the form of a complex of the protein(s) or other active ingredient(s) of present invention along with protein or peptide antigens. The protein and/or peptide antigen will deliver a stimulatory signal to both B and T lymphocytes. B lymphocytes will respond to antigen through their surface immunoglobulin receptor. T lymphocytes will respond to antigen through the T cell receptor (TCR) following presentation of the antigen by MHC proteins. MHC and structurally related proteins including those encoded by class I and class II MHC genes on host cells will serve to present the peptide antigen(s) to T lymphocytes. The antigen components could also be supplied as purified MHC-peptide complexes alone or with co-stimulatory molecules that can directly signal T cells. Alternatively antibodies able to bind surface immunoglobulin and other molecules on B cells as well as antibodies able to bind the TCR and other molecules on T cells can be combined with the pharmaceutical composition of the invention.

[0332] The pharmaceutical composition of the invention may be in the form of a liposome in which protein of the present invention is combined, in addition to other pharmaceutically acceptable carriers, with amphipathic agents such as lipids which exist in aggregated form as micelles, insoluble monolayers, liquid crystals, or lamellar layers in aqueous solution. Suitable lipids for liposomal formulation include, without limitation, monoglycerides, diglycerides, sulfatides, lysolecithins, phospholipids, saponin, bile acids, and the like. Preparation of such liposomal formulations is within the level of skill in the art, as disclosed, for example, in U.S. Pat. Nos. 4,235,871; 4,501,728; 4,837,028; and 4,737,323, all of which are incorporated herein by reference.

[0333] The amount of protein or other active ingredient of the present invention in the pharmaceutical composition of the present invention will depend upon the nature and severity of the condition being treated, and on the nature of prior treatments which the patient has undergone. Ultimately, the attending physician will decide the amount of protein or other active ingredient of the present invention with which to treat each individual patient. Initially, the attending physician will administer low doses of protein or other active ingredient of the present invention and observe the patient's response. Larger doses of protein or other active ingredient of the present invention may be administered until the optimal therapeutic effect is obtained for the patient, and at that point the dosage is not increased further. It is contemplated that the various pharmaceutical compositions used to practice the method of the present invention should contain about 0.01 μg to about 100 mg (preferably about 0.1 μg to about 10 mg, more preferably about 0.1 μg to about 1 mg) of protein or other active ingredient of the present invention per kg body weight. For compositions of the present invention which are useful for bone, cartilage, tendon or ligament regeneration, the therapeutic method includes administering the composition topically, systematically, or locally as an implant or device. When administered, the therapeutic composition for use in this invention is, of course, in a pyrogen-free, physiologically acceptable form. Further, the composition may desirably be encapsulated or injected in a viscous form for delivery to the site of bone, cartilage or tissue damage. Topical administration may be suitable for wound healing and tissue repair. Therapeutically useful agents other than a protein or other active ingredient of the invention which may also optionally be included in the composition as described above, may alternatively or additionally, be administered simultaneously or sequentially with the composition in the methods of the invention. Preferably for bone and/or cartilage formation, the composition would include a matrix capable of delivering the protein-containing or other active ingredient-containing composition to the site of bone and/or cartilage damage, providing a structure for the developing bone and cartilage and optimally capable of being resorbed into the body. Such matrices may be formed of materials presently in use for other implanted medical applications.

[0334] The choice of matrix material is based on biocompatibility, biodegradability, mechanical properties, cosmetic appearance and interface properties. The particular application of the compositions will define the appropriate formulation. Potential matrices for the compositions may be biodegradable and chemically defined calcium sulfate, tricalcium phosphate, hydroxyapatite, polylactic acid, polyglycolic acid and polyanhydrides. Other potential materials are biodegradable and biologically well-defined, such as bone or dermal collagen. Further matrices are comprised of pure proteins or extracellular matrix components. Other potential matrices are nonbiodegradable and chemically defined, such as sintered hydroxyapatite, bioglass, aluminates, or other ceramics. Matrices may be comprised of combinations of any of the above mentioned types of material, such as polylactic acid and hydroxyapatite or collagen and tricalcium phosphate. The bioceramics may be altered in composition, such as in calcium-aluminate-phosphate and processing to alter pore size, particle size, particle shape, and biodegradability. Presently preferred is a 50:50 (mole weight) copolymer of lactic acid and glycolic acid in the form of porous particles having diameters ranging from 150 to 800 microns. In some applications, it will be useful to utilize a sequestering agent, such as carboxymethyl cellulose or autologous blood clot, to prevent the protein compositions from disassociating from the matrix.

[0335] A preferred family of sequestering agents is cellulosic materials such as alkylcelluloses (including hydroxyalkylcelluloses), including methylcellulose, ethylcellulose, hydroxyethylcellulose, hydroxypropylcellulose, hydroxypropyl-methylcellulose, and carboxymethylcellulose, the most preferred being cationic salts of carboxymethylcellulose (CMC). Other preferred sequestering agents include hyaluronic acid, sodium alginate, poly(ethylene glycol), polyoxyethylene oxide, carboxyvinyl polymer and poly(vinyl alcohol). The amount of sequestering agent useful herein is 0.5-20 wt %, preferably 1-10 wt % based on total formulation weight, which represents the amount necessary to prevent desorption of the protein from the polymer matrix and to provide appropriate handling of the composition, yet not so much that the progenitor cells are prevented from infiltrating the matrix, thereby providing the protein the opportunity to assist the osteogenic activity of the progenitor cells. In further compositions, proteins or other active ingredients of the invention may be combined with other agents beneficial to the treatment of the bone and/or cartilage defect, wound, or tissue in question. These agents include various growth factors such as epidermal growth factor (EGF), platelet derived growth factor (PDGF), transforming growth factors (TGF-α and TGF-β), and insulin-like growth factor (IGF).

[0336] The therapeutic compositions are also presently valuable for veterinary applications. Particularly domestic animals and thoroughbred horses, in addition to humans, are desired patients for such treatment with proteins or other active ingredients of the present invention. The dosage regimen of a protein-containing pharmaceutical composition to be used in tissue regeneration will be determined by the attending physician considering various factors which modify the action of the proteins, e.g., amount of tissue weight desired to be formed, the site of damage, the condition of the damaged tissue, the size of a wound, type of damaged tissue (e.g., bone), the patient's age, sex, and diet, the severity of any infection, time of administration and other clinical factors. The dosage may vary with the type of matrix used in the reconstitution and with inclusion of other proteins in the pharmaceutical composition. For example, the addition of other known growth factors, such as IGF I (insulin like growth factor I), to the final composition, may also effect the dosage. Progress can be monitored by periodic assessment of tissue/bone growth and/or repair, for example, X-rays, histomorphometric determinations and tetracycline labeling.

[0337] Polynucleotides of the present invention can also be used for gene therapy. Such polynucleotides can be introduced either in vivo or ex vivo into cells for expression in a mammalian subject. Polynucleotides of the invention may also be administered by other known methods for introduction of nucleic acid into a cell or organism (including, without limitation, in the form of viral vectors or naked DNA). Cells may also be cultured ex vivo in the presence of proteins of the present invention in order to proliferate or to produce a desired effect on or activity in such cells. Treated cells can then be introduced in vivo for therapeutic purposes.

[0338] 4.12.3 Effective Dosage

[0339] Pharmaceutical compositions suitable for use in the present invention include compositions wherein the active ingredients are contained in an effective amount to achieve its intended purpose. More specifically, a therapeutically effective amount means an amount effective to prevent development of or to alleviate the existing symptoms of the subject being treated. Determination of the effective amount is well within the capability of those skilled in the art, especially in light of the detailed disclosure provided herein. For any compound used in the method of the invention, the therapeutically effective dose can be estimated initially from appropriate in vitro assays. For example, a dose can be formulated in animal models to achieve a circulating concentration range that can be used to more accurately determine useful doses in humans. For example, a dose can be formulated in animal models to achieve a circulating concentration range that includes the IC₅₀ as determined in cell culture (i.e., the concentration of the test compound which achieves a half-maximal inhibition of the protein's biological activity). Such information can be used to more accurately determine useful doses in humans.

[0340] A therapeutically effective dose refers to that amount of the compound that results in amelioration of symptoms or a prolongation of survival in a patient. Toxicity and therapeutic efficacy of such compounds can be determined by standard pharmaceutical procedures in cell cultures or experimental animals, e.g., for determining the LD₅₀ (the dose lethal to 50% of the population) and the ED₅₀ (the dose therapeutically effective in 50% of the population). The dose ratio between toxic and therapeutic effects is the therapeutic index and it can be expressed as the ratio between LD₅₀ and ED₅₀. Compounds which exhibit high therapeutic indices are preferred. The data obtained from these cell culture assays and animal studies can be used in formulating a range of dosage for use in human. The dosage of such compounds lies preferably within a range of circulating concentrations that include the ED₅₀ with little or no toxicity. The dosage may vary within this range depending upon the dosage form employed and the route of administration utilized. The exact formulation, route of administration and dosage can be chosen by the individual physician in view of the patient's condition. See, e.g., Fingl et al., 1975, in “The Pharmacological Basis of Therapeutics”, Ch. 1 p.1. Dosage amount and interval may be adjusted individually to provide plasma levels of the active moiety which are sufficient to maintain the desired effects, or minimal effective concentration (MEC). The MEC will vary for each compound but can be estimated from in vitro data. Dosages necessary to achieve the MEC will depend on individual characteristics and route of administration. However, HPLC assays or bioassays can be used to determine plasma concentrations.

[0341] Dosage intervals can also be determined using MEC value. Compounds should be administered using a regimen which maintains plasma levels above the MEC for 10-90% of the time, preferably between 30-90% and most preferably between 50-90%. In cases of local administration or selective uptake, the effective local concentration of the drug may not be related to plasma concentration.

[0342] An exemplary dosage regimen for polypeptides or other compositions of the invention will be in the range of about 0.01 μg/kg to 100 mg/kg of body weight daily, with the preferred dose being about 0.1 μg to 25 mg/kg of patient body weight daily, varying in adults and children. Dosing may be once daily, or equivalent doses may be delivered at longer or shorter intervals.

[0343] The amount of composition administered will, of course, be dependent on the subject being treated, on the subject's age and weight, the severity of the affliction, the manner of administration and the judgment of the prescribing physician.

[0344] 4.12.4 Packaging

[0345] The compositions may, if desired, be presented in a pack or dispenser device which may contain one or more unit dosage forms containing the active ingredient. The pack may, for example, comprise metal or plastic foil, such as a blister pack. The pack or dispenser device may be accompanied by instructions for administration. Compositions comprising a compound of the invention formulated in a compatible pharmaceutical carrier may also be prepared, placed in an appropriate container, and labeled for treatment of an indicated condition.

[0346] 4.13 Antibodies

[0347] Also included in the invention are antibodies to proteins, or fragments of proteins of the invention. The term “antibody” as used herein refers to immunoglobulin molecules and immunologically active portions of immunoglobulin (Ig) molecules, i.e., molecules that contain an antigen-binding site that specifically binds (immunoreacts with) an antigen. Such antibodies include, but are not limited to, polyclonal, monoclonal, chimeric, single chain, F_{ab}, F_{ab′} and F_{(ab′)2} fragments, and an F_{ab} expression library. In general, an antibody molecule obtained from humans relates to any of the classes IgG, IgM, IgA, IgE and IgD, which differ from one another by the nature of the heavy chain present in the molecule. Certain classes have subclasses as well, such as IgG₁, IgG₂, and others. Furthermore, in humans, the light chain may be a kappa chain or a lambda chain. Reference herein to antibodies includes a reference to all such classes, subclasses and types of human antibody species.

[0348] An isolated related protein of the invention may be intended to serve as an antigen, or a portion or fragment thereof, and additionally can be used as an immunogen to generate antibodies that immunospecifically bind the antigen, using standard techniques for polyclonal and monoclonal antibody preparation. The full-length protein can be used or, alternatively, the invention provides antigenic peptide fragments of the antigen for use as immunogens. An antigenic peptide fragment comprises at least 6 amino acid residues of the amino acid sequence of the full length protein, such as an amino acid sequence shown in SEQ ID NO: 949, and encompasses an epitope thereof such that an antibody raised against the peptide forms a specific immune complex with the full length protein or with any fragment that contains the epitope. Preferably, the antigenic peptide comprises at least 10 amino acid residues, or at least 15 amino acid residues, or at least 20 amino acid residues, or at least 30 amino acid residues. Preferred epitopes encompassed by the antigenic peptide are regions of the protein that are located on its surface; commonly these are hydrophilic regions.

[0349] In certain embodiments of the invention, at least one epitope encompassed by the antigenic peptide is a region of ARP-like protein that is located on the surface of the protein, e.g., a hydrophilic region. A hydrophobicity analysis of the human related protein sequence will indicate which regions of a related protein are particularly hydrophilic and, therefore, are likely to encode surface residues useful for targeting antibody production. As a means for targeting antibody production, hydropathy plots showing regions of hydrophilicity and hydrophobicity may be generated by any method well known in the art, including, for example, the Kyte Doolittle or the Hopp Woods methods, either with or without Fourier transformation. See, e.g., Hopp and Woods, Proc. Nat. Acad. Sci. USA 78: 3824-3828 (1981); Kyte and Doolittle J. Mol. Biol. 157: 105-142 (1982), each of which is incorporated herein by reference in its entirety. Antibodies that are specific for one or more domains within an antigenic protein, or derivatives, fragments, analogs or homologs thereof, are also provided herein.

[0350] A protein of the invention, or a derivative, fragment, analog, homolog or ortholog thereof, may be utilized as an immunogen in the generation of antibodies that immunospecifically bind these protein components.

[0351] The term “specific for” indicates that the variable regions of the antibodies of the invention recognize and bind polypeptides of the invention exclusively (i.e., able to distinguish the polypeptide of the invention from other similar polypeptides despite sequence identity, homology, or similarity found in the family of polypeptides), but may also interact with other proteins (for example, S. aureus protein A or other antibodies in ELISA techniques) through interactions with sequences outside the variable region of the antibodies, and in particular, in the constant region of the molecule. Screening assays to determine binding specificity of an antibody of the invention are well known and routinely practiced in the art. For a comprehensive discussion of such assays, see Harlow et al. (Eds), Antibodies A Laboratory Manual; Cold Spring Harbor Laboratory; Cold Spring Harbor, N.Y. (1988), Chapter 6. Antibodies that recognize and bind fragments of the polypeptides of the invention are also contemplated, provided that the antibodies are first and foremost specific for, as defined above, full-length polypeptides of the invention. As with antibodies that are specific for full length polypeptides of the invention, antibodies of the invention that recognize fragments are those which can distinguish polypeptides from the same family of polypeptides despite inherent sequence identity, homology, or similarity found in the family of proteins.

[0352] Antibodies of the invention are useful for, for example, therapeutic purposes (by modulating activity of a polypeptide of the invention), diagnostic purposes to detect or quantitate a polypeptide of the invention, as well as purification of a polypeptide of the invention. Kits comprising an antibody of the invention for any of the purposes described herein are also comprehended. In general, a kit of the invention also includes a control antigen for which the antibody is immunospecific. The invention further provides a hybridoma that produces an antibody according to the invention. Antibodies of the invention are useful for detection and/or purification of the polypeptides of the invention.

[0353] Monoclonal antibodies binding to the protein of the invention may be useful diagnostic agents for the immunodetection of the protein. Neutralizing monoclonal antibodies binding to the protein may also be useful therapeutics for both conditions associated with the protein and also in the treatment of some forms of cancer where abnormal expression of the protein is involved. In the case of cancerous cells or leukemic cells, neutralizing monoclonal antibodies against the protein may be useful in detecting and preventing the metastatic spread of the cancerous cells, which may be mediated by the protein.

[0354] The labeled antibodies of the present invention can be used for in vitro, in vivo, and in situ assays to identify cells or tissues in which a fragment of the polypeptide of interest is expressed. The antibodies may also be used directly in therapies or other diagnostics. The present invention further provides the above-described antibodies immobilized on a solid support. Examples of such solid supports include plastics such as polycarbonate, complex carbohydrates such as agarose and Sepharose®, acrylic resins and such as polyacrylamide and latex beads. Techniques for coupling antibodies to such solid supports are well known in the art (Weir, D. M. et al., “Handbook of Experimental Immunology” 4th Ed., Blackwell Scientific Publications, Oxford, England, Chapter 10 (1986); Jacoby, W. D. et al., Meth. Enzym. 34 Academic Press, N.Y. (1974)). The immobilized antibodies of the present invention can be used for in vitro, in vivo, and in situ assays as well as for immuno-affinity purification of the proteins of the present invention.

[0355] Various procedures known within the art may be used for the production of polyclonal or monoclonal antibodies directed against a protein of the invention, or against derivatives, fragments, analogs homologs or orthologs thereof (see, for example, Antibodies: A Laboratory Manual, Harlow E, and Lane D, 1988, Cold Spring Harbor Laboratory Press, Cold Spring Harbor, N.Y., incorporated herein by reference). Some of these antibodies are discussed below.

[0356] 4.13.1 Polyclonal Antibodies

[0357] For the production of polyclonal antibodies, various suitable host animals (e.g., rabbit, goat, mouse or other mammal) may be immunized by one or more injections with the native protein, a synthetic variant thereof or a derivative of the foregoing. An appropriate immunogenic preparation can contain, for example, the naturally occurring immunogenic protein, a chemically synthesized polypeptide representing the immunogenic protein, or a recombinantly expressed immunogenic protein. Furthermore, the protein may be conjugated to a second protein known to be immunogenic in the mammal being immunized. Examples of such immunogenic proteins include but are not limited to keyhole limpet hemocyanin, serum albumin, bovine thyroglobulin, and soybean trypsin inhibitor. The preparation can further include an adjuvant. Various adjuvants used to increase the immunological response include, but are not limited to, Freund's (complete and incomplete), mineral gels (e.g., aluminum hydroxide), surface-active substances (e.g., lysolecithin, pluronic polyols, polyanions, peptides, oil emulsions, dinitrophenol, etc.), adjuvants usable in humans such as Bacille Calmette-Guerin and Corynebacterium parvum, or similar immunostimulatory agents. Additional examples of adjuvants that can be employed include MPL-TDM adjuvant (monophosphoryl Lipid A, synthetic trehalose dicorynomycolate).

[0358] The polyclonal antibody molecules directed against the immunogenic protein can be isolated from the mammal (e.g., from the blood) and further purified by well known techniques, such as affinity chromatography using protein A or protein G, which provide primarily the IgG fraction of immune serum. Subsequently, or alternatively, the specific antigen which is the target of the immunoglobulin sought, or an epitope thereof, may be immobilized on a column to purify the immune specific antibody by immunoaffinity chromatography. Purification of immunoglobulins is discussed, for example, by D. Wilkinson (The Scientist, published by The Scientist, Inc., Philadelphia Pa., Vol. 14, No. 8 (Apr. 17, 2000), pp. 25-28).

[0359] 4.13.2 Monoclonal Antibodies

[0360] The term “monoclonal antibody” (MAb) or “monoclonal antibody composition”, as used herein, refers to a population of antibody molecules that contain only one molecular species of antibody molecule consisting of a unique light chain gene product and a unique heavy chain gene product. In particular, the complementarity determining regions (CDRs) of the monoclonal antibody are identical in all the molecules of the population. MAbs thus contain an antigen-binding site capable of immunoreacting with a particular epitope of the antigen characterized by a unique binding affinity for it.

[0361] Monoclonal antibodies can be prepared using hybridoma methods, such as those described by Kohler and Milstein, Nature, 256:495 (1975). In a hybridoma method, a mouse, hamster, or other appropriate host animal, is typically immunized with an immunizing agent to elicit lymphocytes that produce or are capable of producing antibodies that will specifically bind to the immunizing agent. Alternatively, the lymphocytes can be immunized in vitro.

[0362] The immunizing agent will typically include the protein antigen, a fragment thereof or a fusion protein thereof. Generally, either peripheral blood lymphocytes are used if cells of human origin are desired, or spleen cells or lymph node cells are used if non-human mammalian sources are desired. The lymphocytes are then fused with an immortalized cell line using a suitable fusing agent, such as polyethylene glycol, to form a hybridoma cell (Goding, Monoclonal Antibodies: Principles and Practice, Academic Press, (1986) pp. 59-103). Immortalized cell lines are usually transformed mammalian cells, particularly myeloma cells of rodent, bovine and human origin. Usually, rat or mouse myeloma cell lines are employed. The hybridoma cells can be cultured in a suitable culture medium that preferably contains one or more substances that inhibit the growth or survival of the unfused, immortalized cells. For example, if the parental cells lack the enzyme hypoxanthine guanine phosphoribosyl transferase (HGPRT or HPRT), the culture medium for the hybridomas typically will include hypoxanthine, aminopterin, and thymidine (“HAT medium”), which substances prevent the growth of HGPRT-deficient cells.

[0363] Preferred immortalized cell lines are those that fuse efficiently, support stable high level expression of antibody by the selected antibody-producing cells, and are sensitive to a medium such as HAT medium. More preferred immortalized cell lines are murine myeloma lines, which can be obtained, for instance, from the Salk Institute Cell Distribution Center, San Diego, Calif. and the American Type Culture Collection, Manassas, Va. Human myeloma and mouse-human heteromyeloma cell lines also have been described for the production of human monoclonal antibodies (Kozbor, J. Immunol., 133:3001 (1984); Brodeur et al., Monoclonal Antibody Production Techniques and Applications, Marcel Dekker, Inc., New York, (1987) pp. 51-63).

[0364] The culture medium in which the hybridoma cells are cultured can then be assayed for the presence of monoclonal antibodies directed against the antigen. Preferably, the binding specificity of monoclonal antibodies produced by the hybridoma cells is determined by immunoprecipitation or by an in vitro binding assay, such as radioimmunoassay (RIA) or enzyme-linked immunoabsorbent assay (ELISA). Such techniques and assays are known in the art. The binding affinity of the monoclonal antibody can, for example, be determined by the Scatchard analysis of Munson and Pollard, Anal. Biochem., 107:220 (1980). Preferably, antibodies having a high degree of specificity and a high binding affinity for the target antigen are isolated.

[0365] After the desired hybridoma cells are identified, the clones can be subcloned by limiting dilution procedures and grown by standard methods. Suitable culture media for this purpose include, for example, Dulbecco's Modified Eagle's Medium and RPMI-1640 medium. Alternatively, the hybridoma cells can be grown in vivo as ascites in a mammal.

[0366] The monoclonal antibodies secreted by the subclones can be isolated or purified from the culture medium or ascites fluid by conventional immunoglobulin purification procedures such as, for example, protein A-Sepharose, hydroxylapatite chromatography, gel electrophoresis, dialysis, or affinity chromatography.

[0367] The monoclonal antibodies can also be made by recombinant DNA methods, such as those described in U.S. Pat. No. 4,816,567. DNA encoding the monoclonal antibodies of the invention can be readily isolated and sequenced using conventional procedures (e.g., by using oligonucleotide probes that are capable of binding specifically to genes encoding the heavy and light chains of murine antibodies). The hybridoma cells of the invention serve as a preferred source of such DNA. Once isolated, the DNA can be placed into expression vectors, which are then transfected into host cells such as simian COS cells, Chinese hamster ovary (CHO) cells, or myeloma cells that do not otherwise produce immunoglobulin protein, to obtain the synthesis of monoclonal antibodies in the recombinant host cells. The DNA also can be modified, for example, by substituting the coding sequence for human heavy and light chain constant domains in place of the homologous murine sequences (U.S. Pat. No. 4,816,567; Morrison, Nature 368, 812-13 (1994)) or by covalently joining to the immunoglobulin coding sequence all or part of the coding sequence for a non-immunoglobulin polypeptide. Such a non-immunoglobulin polypeptide can be substituted for the constant domains of an antibody of the invention, or can be substituted for the variable domains of one antigen-combining site of an antibody of the invention to create a chimeric bivalent antibody.

[0368] 4.13.3 Humanized Antibodies

[0369] The antibodies directed against the protein antigens of the invention can further comprise humanized antibodies or human antibodies. These antibodies are suitable for administration to humans without engendering an immune response by the human against the administered immunoglobulin. Humanized forms of antibodies are chimeric immunoglobulins, immunoglobulin chains or fragments thereof (such as Fv, Fab, Fab′, F(ab′)₂ or other antigen-binding subsequences of antibodies) that are principally comprised of the sequence of a human immunoglobulin, and contain minimal sequence derived from a non-human immunoglobulin. Humanization can be performed following the method of Winter and co-workers (Jones et al., Nature, 321:522-525 (1986); Riechmann et al., Nature, 332:323-327 (1988); Verhoeyen et al., Science, 239:1534-1536 (1988)), by substituting rodent CDRs or CDR sequences for the corresponding sequences of a human antibody. (See also U.S. Pat. No. 5,225,539). In some instances, Fv framework residues of the human immunoglobulin are replaced by corresponding non-human residues. Humanized antibodies can also comprise residues that are found neither in the recipient antibody nor in the imported CDR or framework sequences. In general, the humanized antibody will comprise substantially all of at least one, and typically two, variable domains, in which all or substantially all of the CDR regions correspond to those of a non-human immunoglobulin and all or substantially all of the framework regions are those of a human immunoglobulin consensus sequence. The humanized antibody optimally also will comprise at least a portion of an immunoglobulin constant region (Fc), typically that of a human immunoglobulin (Jones et al., 1986; Riechmann et al., 1988; and Presta, Curr. Op. Struct. Biol., 2:593-596 (1992)).

[0370] 4.13.4 Human Antibodies

[0371] Fully human antibodies relate to antibody molecules in which essentially the entire sequences of both the light chain and the heavy chain, including the CDRs, arise from human genes. Such antibodies are termed “human antibodies” or “fully human antibodies” herein. Human monoclonal antibodies can be prepared by the trioma technique; the human B-cell hybridoma technique (see Kozbor, et al., Immunol Today 4: 72 (1983)) and the EBV hybridoma technique to produce human monoclonal antibodies (see Cole, et al., 1985 In: MONOCLONAL ANTIBODIES AND CANCER THERAPY, Alan R. Liss, Inc., pp. 77-96). Human monoclonal antibodies may be utilized in the practice of the present invention and may be produced by using human hybridomas (see Cote, et al., Proc Natl Acad Sci USA 80: 2026-2030 (1983)) or by transforming human B-cells with Epstein Barr Virus in vitro (see Cole, et al., 1985 In: MONOCLONAL ANTIBODIES AND CANCER THERAPY, Alan R. Liss, Inc., pp. 77-96).

[0372] In addition, human antibodies can also be produced using additional techniques, including phage display libraries (Hoogenboom and Winter, J. Mol. Biol., 227:381 (1991); Marks et al., J. Mol. Biol., 222:581 (1991)). Similarly, human antibodies can be made by introducing human immunoglobulin loci into transgenic animals, e.g., mice in which the endogenous immunoglobulin genes have been partially or completely inactivated. Upon challenge, human antibody production is observed, which closely resembles that seen in humans in all respects, including gene rearrangement, assembly, and antibody repertoire. This approach is described, for example, in U.S. Pat. Nos. 5,545,807; 5,545,806; 5,569,825; 5,625,126; 5,633,425; 5,661,016, and in Marks et al. (Bio/Technology 10, 779-783 (1992)); Lonberg et al. (Nature 368 856-859 (1994)); Morrison (Nature 368, 812-13 (1994)); Fishwild et al, (Nature Biotechnology 14, 845-51 (1996)); Neuberger (Nature Biotechnology 14, 826 (1996)); and Lonberg and Huszar (Intern. Rev. Immunol. 13 65-93 (1995)).

[0373] Human antibodies may additionally be produced using transgenic nonhuman animals that are modified so as to produce fully human antibodies rather than the animal's endogenous antibodies in response to challenge by an antigen. (See PCT publication WO94/02602). The endogenous genes encoding the heavy and light immunoglobulin chains in the nonhuman host have been incapacitated, and active loci encoding human heavy and light chain immunoglobulins are inserted into the host's genome. The human genes are incorporated, for example, using yeast artificial chromosomes containing the requisite human DNA segments. An animal which provides all the desired modifications is then obtained as progeny by crossbreeding intermediate transgenic animals containing fewer than the full complement of the modifications. The preferred embodiment of such a nonhuman animal is a mouse, and is termed the Xenomouse™ as disclosed in PCT publications WO 96/33735 and WO 96/34096. This animal produces B cells that secrete fully human immunoglobulins. The antibodies can be obtained directly from the animal after immunization with an immunogen of interest, as, for example, a preparation of a polyclonal antibody, or alternatively from immortalized B cells derived from the animal, such as hybridomas producing monoclonal antibodies. Additionally, the genes encoding the immunoglobulins with human variable regions can be recovered and expressed to obtain the antibodies directly, or can be further modified to obtain analogs of antibodies such as, for example, single chain Fv molecules.

[0374] An example of a method of producing a nonhuman host, exemplified as a mouse, lacking expression of an endogenous immunoglobulin heavy chain is disclosed in U.S. Pat. No. 5,939,598. It can be obtained by a method including deleting the J segment genes from at least one endogenous heavy chain locus in an embryonic stem cell to prevent rearrangement of the locus and to prevent formation of a transcript of a rearranged immunoglobulin heavy chain locus, the deletion being effected by a targeting vector containing a gene encoding a selectable marker; and producing from the embryonic stem cell a transgenic mouse whose somatic and germ cells contain the gene encoding the selectable marker.

[0375] A method for producing an antibody of interest, such as a human antibody, is disclosed in U.S. Pat. No. 5,916,771. It includes introducing an expression vector that contains a nucleotide sequence encoding a heavy chain into one mammalian host cell in culture, introducing an expression vector containing a nucleotide sequence encoding a light chain into another mammalian host cell, and fusing the two cells to form a hybrid cell. The hybrid cell expresses an antibody containing the heavy chain and the light chain.

[0376] In a further improvement on this procedure, a method for identifying a clinically relevant epitope on an immunogen, and a correlative method for selecting an antibody that binds immunospecifically to the relevant epitope with high affinity, is disclosed in PCT publication WO 99/53049.

[0377] 4.13.5 Fab Fragments and Single Chain Antibodies

[0378] According to the invention, techniques can be adapted for the production of single-chain antibodies specific to an antigenic protein of the invention (see e.g., U.S. Pat. No. 4,946,778). In addition, methods can be adapted for the construction of F_{ab} expression libraries (see e.g., Huse, et al., Science 246: 1275-1281 (1989)) to allow rapid and effective identification of monoclonal F_{ab} fragments with the desired specificity for a protein or derivatives, fragments, analogs or homologs thereof. Antibody fragments that contain the idiotypes to a protein antigen may be produced by techniques known in the art including, but not limited to: (i) an F_{(ab′)2} fragment produced by pepsin digestion of an antibody molecule; (ii) an F_{ab} fragment generated by reducing the disulfide bridges of an F_{(ab′)2} fragment; (iii) an F_{ab} fragment generated by the treatment of the antibody molecule with papain and a reducing agent and (iv) Fᵥ fragments.

[0379] 4.13.6 Bispecific Antibodies

[0380] Bispecific antibodies are monoclonal, preferably human or humanized, antibodies that have binding specificities for at least two different antigens. In the present case, one of the binding specificities is for an antigenic protein of the invention. The second binding target is any other antigen, and advantageously is a cell-surface protein or receptor or receptor subunit.

[0381] Methods for making bispecific antibodies are known in the art. Traditionally, the recombinant production of bispecific antibodies is based on the co-expression of two immunoglobulin heavy-chain/light-chain pairs, where the two heavy chains have different specificities (Milstein and Cuello, Nature, 305:537-539 (1983)). Because of the random assortment of immunoglobulin heavy and light chains, these hybridomas (quadromas) produce a potential mixture of ten different antibody molecules, of which only one has the correct bispecific structure. The purification of the correct molecule is usually accomplished by affinity chromatography steps. Similar procedures are disclosed in WO 93/08829, published 13 May 1993, and in Traunecker et al., EMBO J., 10:3655-3659 (1991).

[0382] Antibody variable domains with the desired binding specificities (antibody-antigen combining sites) can be fused to immunoglobulin constant domain sequences. The fusion preferably is with an immunoglobulin heavy-chain constant domain, comprising at least part of the hinge, CH2, and CH3 regions. It is preferred to have the first heavy-chain constant region (CH1) containing the site necessary for light-chain binding present in at least one of the fusions. DNAs encoding the immunoglobulin heavy-chain fusions and, if desired, the immunoglobulin light chain, are inserted into separate expression vectors, and are co-transfected into a suitable host organism. For further details of generating bispecific antibodies see, for example, Suresh et al., Meth. Enzymol., 121:210 (1986).

[0383] According to another approach described in WO 96/27011, the interface between a pair of antibody molecules can be engineered to maximize the percentage of heterodimers that are recovered from recombinant cell culture. The preferred interface comprises at least a part of the CH3 region of an antibody constant domain. In this method, one or more small amino acid side chains from the interface of the first antibody molecule are replaced with larger side chains (e.g. tyrosine or tryptophan). Compensatory “cavities” of identical or similar size to the large side chain(s) are created on the interface of the second antibody molecule by replacing large amino acid side chains with smaller ones (e.g. alanine or threonine). This provides a mechanism for increasing the yield of the heterodimer over other unwanted end-products such as homodimers.

[0384] Bispecific antibodies can be prepared as full length antibodies or antibody fragments (e.g. F(ab′)₂ bispecific antibodies). Techniques for generating bispecific antibodies from antibody fragments have been described in the literature. For example, bispecific antibodies can be prepared using chemical linkage. Brennan et al., Science 229:81 (1985) describe a procedure wherein intact antibodies are proteolytically cleaved to generate F(ab′)₂ fragments. These fragments are reduced in the presence of the dithiol complexing agent sodium arsenite to stabilize vicinal dithiols and prevent intermolecular disulfide formation. The Fab′ fragments generated are then converted to thionitrobenzoate (TNB) derivatives. One of the Fab′-TNB derivatives is then reconverted to the Fab′-thiol by reduction with mercaptoethylamine and is mixed with an equimolar amount of the other Fab′-TNB derivative to form the bispecific antibody. The bispecific antibodies produced can be used as agents for the selective immobilization of enzymes.

[0385] Additionally, Fab′ fragments can be directly recovered from E. coli and chemically coupled to form bispecific antibodies. Shalaby et al., J. Exp. Med. 175:217-225 (1992) describe the production of a fully humanized bispecific antibody F(ab′)₂ molecule. Each Fab′ fragment was separately secreted from E. coli and subjected to directed chemical coupling in vitro to form the bispecific antibody. The bispecific antibody thus formed was able to bind to cells overexpressing the ErbB2 receptor and normal human T cells, as well as trigger the lytic activity of human cytotoxic lymphocytes against human breast tumor targets.

[0386] Various techniques for making and isolating bispecific antibody fragments directly from recombinant cell culture have also been described. For example, bispecific antibodies have been produced using leucine zippers. Kostelny et al., J. Immunol. 148:1547-1553 (1992). The leucine zipper peptides from the Fos and Jun proteins were linked to the Fab′ portions of two different antibodies by gene fusion. The antibody homodimers were reduced at the hinge region to form monomers and then re-oxidized to form the antibody heterodimers. This method can also be utilized for the production of antibody homodimers. The “diabody” technology described by Hollinger et al., Proc. Natl. Acad. Sci. USA 90:6444-6448 (1993) has provided an alternative mechanism for making bispecific antibody fragments. The fragments comprise a heavy-chain variable domain (V_{H}) connected to a light-chain variable domain (V_{L}) by a linker which is too short to allow pairing between the two domains on the same chain. Accordingly, the V_{H} and V_{L} domains of one fragment are forced to pair with the complementary V_{L} and V_{H} domains of another fragment, thereby forming two antigen-binding sites. Another strategy for making bispecific antibody fragments by the use of single-chain Fv (sFv) dimers has also been reported. See, Gruber et al., J. Immunol. 152:5368 (1994).

[0387] Antibodies with more than two valencies are contemplated. For example, trispecific antibodies can be prepared. Tutt et al., J. Immunol. 147:60 (1991).

[0388] Exemplary bispecific antibodies can bind to two different epitopes, at least one of which originates in the protein antigen of the invention. Alternatively, an anti-antigenic arm of an immunoglobulin molecule can be combined with an arm which binds to a triggering molecule on a leukocyte such as a T-cell receptor molecule (e.g. CD2, CD3, CD28, or B7), or Fc receptors for IgG (FcγR), such as FcγRI (CD64), FcγRII (CD32) and FcγRIII (CD16) so as to focus cellular defense mechanisms to the cell expressing the particular antigen. Bispecific antibodies can also be used to direct cytotoxic agents to cells which express a particular antigen. These antibodies possess an antigen-binding arm and an arm which binds a cytotoxic agent or a radionuclide chelator, such as EOTUBE, DPTA, DOTA, or TETA. Another bispecific antibody of interest binds the protein antigen described herein and further binds tissue factor (TF).

[0389] 4.13.7 Heteroconjugate Antibodies

[0390] Heteroconjugate antibodies are also within the scope of the present invention. Heteroconjugate antibodies are composed of two covalently joined antibodies. Such antibodies have, for example, been proposed to target immune system cells to unwanted cells (U.S. Pat. No. 4,676,980), and for treatment of HIV infection (WO 91/00360; WO 92/200373; EP 03089). It is contemplated that the antibodies can be prepared in vitro using known methods in synthetic protein chemistry, including those involving crosslinking agents. For example, immunotoxins can be constructed using a disulfide exchange reaction or by forming a thioether bond. Examples of suitable reagents for this purpose include iminothiolate and methyl-4-mercaptobutyrimidate and those disclosed, for example, in U.S. Pat. No. 4,676,980.

[0391] 4.13.8 Effector Function Engineering

[0392] It can be desirable to modify the antibody of the invention with respect to effector function, so as to enhance, e.g., the effectiveness of the antibody in treating cancer. For example, cysteine residue(s) can be introduced into the Fc region, thereby allowing interchain disulfide bond formation in this region. The homodimeric antibody thus generated can have improved internalization capability and/or increased complement-mediated cell killing and antibody-dependent cellular cytotoxicity (ADCC). See Caron et al., J. Exp Med., 176: 1191-1195 (1992) and Shopes, J. Immunol., 148: 2918-2922 (1992). Homodimeric antibodies with enhanced anti-tumor activity can also be prepared using heterobifunctional cross-linkers as described in Wolff et al. Cancer Research, 53: 2560-2565 (1993). Alternatively, an antibody can be engineered that has dual Fc regions and can thereby have enhanced complement lysis and ADCC capabilities. See Stevenson et al., Anti-Cancer Drug Design, 3: 219-230 (1989).

[0393] 4.13.9 Immunoconjugates

[0394] The invention also pertains to immunoconjugates comprising an antibody conjugated to a cytotoxic agent such as a chemotherapeutic agent, toxin (e.g., an enzymatically active toxin of bacterial, fungal, plant, or animal origin, or fragments thereof), or a radioactive isotope (i.e., a radioconjugate).

[0395] Chemotherapeutic agents useful in the generation of such immunoconjugates have been described above. Enzymatically active toxins and fragments thereof that can be used include diphtheria A chain, nonbinding active fragments of diphtheria toxin, exotoxin A chain (from Pseudomonas aeruginosa), ricin A chain, abrin A chain, modeccin A chain, alpha-sarcin, Aleurites fordii proteins, dianthin proteins, Phytolaca americana proteins (PAPI, PAPII, and PAP-S), momordica charantia inhibitor, curcin, crotin, sapaonaria officinalis inhibitor, gelonin, mitogellin, restrictocin, phenomycin, enomycin, and the tricothecenes. A variety of radionuclides are available for the production of radioconjugated antibodies. Examples include ²¹²Bi, ¹³¹I, ¹³¹In, ⁹⁰Y, and ¹⁸⁶Re.

[0396] Conjugates of the antibody and cytotoxic agent are made using a variety of bifunctional protein-coupling agents such as N-succinimidyl-3-(2-pyridyldithiol) propionate (SPDP), iminothiolane (IT), bifunctional derivatives of imidoesters (such as dimethyl adipimidate HCL), active esters (such as disuccinimidyl suberate), aldehydes (such as glutareldehyde), bis-azido compounds (such as bis (p-azidobenzoyl) hexanediamine), bis-diazonium derivatives (such as bis-(p-diazoniumbenzoyl)-ethylenediamine), diisocyanates (such as tolyene 2,6-diisocyanate), and bis-active fluorine compounds (such as 1,5-difluoro-2,4-dinitrobenzene). For example, a ricin immunotoxin can be prepared as described in Vitetta et al., Science, 238: 1098 (1987). Carbon-14-labeled 1-isothiocyanatobenzyl-3-methyldiethylene triaminepentaacetic acid (MX-DTPA) is an exemplary chelating agent for conjugation of radionucleotide to the antibody. See WO94/11026.

[0397] In another embodiment, the antibody can be conjugated to a “receptor” (such streptavidin) for utilization in tumor pretargeting wherein the antibody-receptor conjugate is administered to the patient, followed by removal of unbound conjugate from the circulation using a clearing agent and then administration of a “ligand” (e.g., avidin) that is in turn conjugated to a cytotoxic agent.

[0398] 4.14 Computer Readable Sequences

[0399] In one application of this embodiment, a nucleotide sequence of the present invention can be recorded on computer readable media. As used herein, “computer readable media” refers to any medium which can be read and accessed directly by a computer. Such media include, but are not limited to: magnetic storage media, such as floppy discs, hard disc storage medium, and magnetic tape; optical storage media such as CD-ROM; electrical storage media such as RAM and ROM; and hybrids of these categories such as magnetic/optical storage media. A skilled artisan can readily appreciate how any of the presently known computer readable mediums can be used to create a manufacture comprising computer readable medium having recorded thereon a nucleotide sequence of the present invention. As used herein, “recorded” refers to a process for storing information on computer readable medium. A skilled artisan can readily adopt any of the presently known methods for recording information on computer readable medium to generate manufactures comprising the nucleotide sequence information of the present invention.

[0400] A variety of data storage structures are available to a skilled artisan for creating a computer readable medium having recorded thereon a nucleotide sequence of the present invention. The choice of the data storage structure will generally be based on the means chosen to access the stored information. In addition, a variety of data processor programs and formats can be used to store the nucleotide sequence information of the present invention on computer readable medium. The sequence information can be represented in a word processing text file, formatted in commercially-available software such as WordPerfect and Microsoft Word, or represented in the form of an ASCII file, stored in a database application, such as DB2, Sybase, Oracle, or the like. A skilled artisan can readily adapt any number of data processor structuring formats (e.g. text file or database) in order to obtain computer readable medium having recorded thereon the nucleotide sequence information of the present invention.

[0401] By providing the nucleotide sequence SEQ ID NO: 796 or a representative fragment thereof; or a nucleotide sequence at least 95% identical to the nucleotide sequence of SEQ ID NO: 796 in computer readable form, a skilled artisan can routinely access the sequence information for a variety of purposes. Computer software is publicly available which allows a skilled artisan to access sequence information provided in a computer readable medium. The examples which follow demonstrate how software which implements the BLAST (Altschul et al., J. Mol. Biol. 215:403-410 (1990)) and BLAZE (Brutlag et al., Comp. Chem. 17:203-207 (1993)) search algorithms on a Sybase system is used to identify open reading frames (ORFs) within a nucleic acid sequence. Such ORFs may be protein encoding fragments and may be useful in producing commercially important proteins such as enzymes used in fermentation reactions and in the production of commercially useful metabolites.

[0402] As used herein, “a computer-based system” refers to the hardware means, software means, and data storage means used to analyze the nucleotide sequence information of the present invention. The minimum hardware means of the computer-based systems of the present invention comprises a central processing unit (CPU), input means, output means, and data storage means. A skilled artisan can readily appreciate that any one of the currently available computer-based systems are suitable for use in the present invention. As stated above, the computer-based systems of the present invention comprise a data storage means having stored therein a nucleotide sequence of the present invention and the necessary hardware means and software means for supporting and implementing a search means. As used herein, “data storage means” refers to memory which can store nucleotide sequence information of the present invention, or a memory access means which can access manufactures having recorded thereon the nucleotide sequence information of the present invention.

[0403] As used herein, “search means” refers to one or more programs which are implemented on the computer-based system to compare a target sequence or target structural motif with the sequence information stored within the data storage means. Search means are used to identify fragments or regions of a known sequence which match a particular target sequence or target motif. A variety of known algorithms are disclosed publicly and a variety of commercially available software for conducting search means are and can be used in the computer-based systems of the present invention. Examples of such software include, but are not limited to, Smith-Waterman, MacPattern (EMBL), BLASTN and BLASTA (NPOLYPEPTIDEIA). A skilled artisan can readily recognize that any one of the available algorithms or implementing software packages for conducting homology searches can be adapted for use in the present computer-based systems. As used herein, a “target sequence” can be any nucleic acid or amino acid sequence of six or more nucleotides or two or more amino acids. A skilled artisan can readily recognize that the longer a target sequence is, the less likely a target sequence will be present as a random occurrence in the database. The most preferred sequence length of a target sequence is from about 10 to 300 amino acids, more preferably from about 30 to 100 nucleotide residues. However, it is well recognized that searches for commercially important fragments, such as sequence fragments involved in gene expression and protein processing, may be of shorter length.

[0404] As used herein, “a target structural motif,” or “target motif,” refers to any rationally selected sequence or combination of sequences in which the sequence(s) are chosen based on a three-dimensional configuration which is formed upon the folding of the target motif. There are a variety of target motifs known in the art. Protein target motifs include, but are not limited to, enzyme active sites and signal sequences. Nucleic acid target motifs include, but are not limited to, promoter sequences, hairpin structures and inducible expression elements (protein binding sequences).

[0405] 4.15 Triple Helix Formation

[0406] In addition, the fragments of the present invention, as broadly described, can be used to control gene expression through triple helix formation or antisense DNA or RNA, both of which methods are based on the binding of a polynucleotide sequence to DNA or RNA. Polynucleotides suitable for use in these methods are preferably 20 to 40 bases in length and are designed to be complementary to a region of the gene involved in transcription (triple helix—see Lee et al., Nucl. Acids Res. 6:3073 (1979); Cooney et al., Science 15241:456 (1988); and Dervan et al., Science 251:1360 (1991)) or to the mRNA itself (antisense—Olmno, J. Neurochem. 56:560 (1991); Oligodeoxynucleotides as Antisense Inhibitors of Gene Expression, CRC Press, Boca Raton, Fla. (1988)). Triple helix-formation optimally results in a shut-off of RNA transcription from DNA, while antisense RNA hybridization blocks translation of an mRNA molecule into polypeptide. Both techniques have been demonstrated to be effective in model systems. Information contained in the sequences of the present invention is necessary for the design of an antisense or triple helix oligonucleotide.

[0407] 4.16 Diagnostic Assays and Kits

[0408] The present invention further provides methods to identify the presence or expression of one of the ORFs of the present invention, or homolog thereof, in a test sample, using a nucleic acid probe or antibodies of the present invention, optionally conjugated or otherwise associated with a suitable label.

[0409] In general, methods for detecting a polynucleotide of the invention can comprise contacting a sample with a compound that binds to and forms a complex with the polynucleotide for a period sufficient to form the complex, and detecting the complex, so that if a complex is detected, a polynucleotide of the invention is detected in the sample. Such methods can also comprise contacting a sample under stringent hybridization conditions with nucleic acid primers that anneal to a polynucleotide of the invention under such conditions, and amplifying annealed polynucleotides, so that if a polynucleotide is amplified, a polynucleotide of the invention is detected in the sample.

[0410] In general, methods for detecting a polypeptide of the invention can comprise contacting a sample with a compound that binds to and forms a complex with the polypeptide for a period sufficient to form the complex, and detecting the complex, so that if a complex is detected, a polypeptide of the invention is detected in the sample.

[0411] In detail, such methods comprise incubating a test sample with one or more of the antibodies or one or more of the nucleic acid probes of the present invention and assaying for binding of the nucleic acid probes or antibodies to components within the test sample.

[0412] Conditions for incubating a nucleic acid probe or antibody with a test sample vary. Incubation conditions depend on the format employed in the assay, the detection methods employed, and the type and nature of the nucleic acid probe or antibody used in the assay. One skilled in the art will recognize that any one of the commonly available hybridization, amplification or immunological assay formats can readily be adapted to employ the nucleic acid probes or antibodies of the present invention. Examples of such assays can be found in Chard, T., An Introduction to Radioimmunoassay and Related Techniques, Elsevier Science Publishers, Amsterdam, The Netherlands (1986); Bullock, G. R. et al., Techniques in Immunocytochemistry, Academic Press, Orlando, Fla. Vol. 1 (1982), Vol. 2 (1983), Vol. 3 (1985); Tijssen, P., Practice and Theory of immunoassays: Laboratory Techniques in Biochemistry and Molecular Biology, Elsevier Science Publishers, Amsterdam, The Netherlands (1985). The test samples of the present invention include cells, protein or membrane extracts of cells, or biological fluids such as sputum, blood, serum, plasma, or urine. The test sample used in the above-described method will vary based on the assay format, nature of the detection method and the tissues, cells or extracts used as the sample to be assayed. Methods for preparing protein extracts or membrane extracts of cells are well known in the art and can be readily be adapted in order to obtain a sample which is compatible with the system utilized.

[0413] In another embodiment of the present invention, kits are provided which contain the necessary reagents to carry out the assays of the present invention. Specifically, the invention provides a compartment kit to receive, in close confinement, one or more containers which comprises: (a) a first container comprising one of the probes or antibodies of the present invention; and (b) one or more other containers comprising one or more of the following: wash reagents, reagents capable of detecting presence of a bound probe or antibody.

[0414] In detail, a compartment kit includes any kit in which reagents are contained in separate containers. Such containers include small glass containers, plastic containers or strips of plastic or paper. Such containers allows one to efficiently transfer reagents from one compartment to another compartment such that the samples and reagents are not cross-contaminated, and the agents or solutions of each container can be added in a quantitative fashion from one compartment to another. Such containers will include a container which will accept the test sample, a container which contains the antibodies used in the assay, containers which contain wash reagents (such as phosphate buffered saline, Tris-buffers, etc.), and containers which contain the reagents used to detect the bound antibody or probe. Types of detection reagents include labeled nucleic acid probes, labeled secondary antibodies, or in the alternative, if the primary antibody is labeled, the enzymatic, or antibody binding reagents which are capable of reacting with the labeled antibody. One skilled in the art will readily recognize that the disclosed probes and antibodies of the present invention can be readily incorporated into one of the established kit formats which are well known in the art.

[0415] 4.17 Medical Imaging

[0416] The novel polypeptides and binding partners of the invention are useful in medical imaging of sites expressing the molecules of the invention (e.g., where the polypeptide of the invention is involved in the immune response, for imaging sites of inflammation or infection). See, e.g., Kunkel et al., U.S. Pat. No. 5,413,778. Such methods involve chemical attachment of a labeling or imaging agent, administration of the labeled polypeptide to a subject in a pharmaceutically acceptable carrier, and imaging the labeled polypeptide in vivo at the target site.

[0417] 4.18 Screening Assays

[0418] Using the isolated proteins and polynucleotides of the invention, the present invention further provides methods of obtaining and identifying agents which bind to a polypeptide encoded by an ORF corresponding to the nucleotide sequence set forth in SEQ ID NO: 796, or bind to a specific domain of the polypeptide encoded by the nucleic acid. In detail, said method comprises the steps of:

[0419] (a) contacting an agent with an isolated protein encoded by an ORF of the present invention, or nucleic acid of the invention; and

[0420] (b) determining whether the agent binds to said protein or said nucleic acid.

[0421] In general, therefore, such methods for identifying compounds that bind to a polynucleotide of the invention can comprise contacting a compound with a polynucleotide of the invention for a time sufficient to form a polynucleotide/compound complex, and detecting the complex, so that if a polynucleotide/compound complex is detected, a compound that binds to a polynucleotide of the invention is identified.

[0422] Likewise, in general, therefore, such methods for identifying compounds that bind to a polypeptide of the invention can comprise contacting a compound with a polypeptide of the invention for a time sufficient to form a polypeptide/compound complex, and detecting the complex, so that if a polypeptide/compound complex is detected, a compound that binds to a polynucleotide of the invention is identified.

[0423] Methods for identifying compounds that bind to a polypeptide of the invention can also comprise contacting a compound with a polypeptide of the invention in a cell for a time sufficient to form a polypeptide/compound complex, wherein the complex drives expression of a receptor gene sequence in the cell, and detecting the complex by detecting reporter gene sequence expression, so that if a polypeptide/compound complex is detected, a compound that binds a polypeptide of the invention is identified.

[0424] Compounds identified via such methods can include compounds which modulate the activity of a polypeptide of the invention (that is, increase or decrease its activity, relative to activity observed in the absence of the compound). Alternatively, compounds identified via such methods can include compounds which modulate the expression of a polynucleotide of the invention (that is, increase or decrease expression relative to expression levels observed in the absence of the compound). Compounds, such as compounds identified via the methods of the invention, can be tested using standard assays well known to those of skill in the art for their ability to modulate activity/expression.

[0425] The agents screened in the above assay can be, but are not limited to, peptides, carbohydrates, vitamin derivatives, or other pharmaceutical agents. The agents can be selected and screened at random or rationally selected or designed using protein modeling techniques.

[0426] For random screening, agents such as peptides, carbohydrates, pharmaceutical agents and the like are selected at random and are assayed for their ability to bind to the protein encoded by the ORF of the present invention. Alternatively, agents may be rationally selected or designed. As used herein, an agent is said to be “rationally selected or designed” when the agent is chosen based on the configuration of the particular protein. For example, one skilled in the art can readily adapt currently available procedures to generate peptides, pharmaceutical agents and the like, capable of binding to a specific peptide sequence, in order to generate rationally designed antipeptide peptides, for example see Hurby et al., Application of Synthetic Peptides: Antisense Peptides,” In Synthetic Peptides, A User's Guide, W. H. Freeman, NY (1992), pp. 289-307, and Kaspczak et al., Biochemistry 28:9230-8 (1989), or pharmaceutical agents, or the like.

[0427] In addition to the foregoing, one class of agents of the present invention, as broadly described, can be used to control gene expression through binding to one of the ORFs or EMFs of the present invention. As described above, such agents can be randomly screened or rationally designed/selected. Targeting the ORF or EMF allows a skilled artisan to design sequence specific or element specific agents, modulating the expression of either a single ORF or multiple ORFs which rely on the same EMF for expression control. One class of DNA binding agents are agents which contain base residues which hybridize or form a triple helix formation by binding to DNA or RNA. Such agents can be based on the classic phosphodiester, ribonucleic acid backbone, or can be a variety of sulfhydryl or polymeric derivatives which have base attachment capacity.

[0428] Agents suitable for use in these methods preferably contain 20 to 40 bases and are designed to be complementary to a region of the gene involved in transcription (triple helix—see Lee et al., Nucl. Acids Res. 6:3073 (1979); Cooney et al., Science 241:456 (1988); and Dervan et al., Science 251:1360 (1991)) or to the mRNA itself (antisense—Okano, J. Neurochem. 56:560 (1991); Oligodeoxynucleotides as Antisense Inhibitors of Gene Expression, CRC Press, Boca Raton, Fla. (1988)). Triple helix-formation optimally results in a shut-off of RNA transcription from DNA, while antisense RNA hybridization blocks translation of an mRNA molecule into polypeptide. Both techniques have been demonstrated to be effective in model systems. Information contained in the sequences of the present invention is necessary for the design of an antisense or triple helix oligonucleotide and other DNA binding agents.

[0429] Agents which bind to a protein encoded by one of the ORFs of the present invention can be used as a diagnostic agent. Agents which bind to a protein encoded by one of the ORFs of the present invention can be formulated using known techniques to generate a pharmaceutical composition.

[0430] 4.19 Use of Nucleic Acids as Probes

[0431] Another aspect of the subject invention is to provide for polypeptide-specific nucleic acid hybridization probes capable of hybridizing with naturally occurring nucleotide sequences. The hybridization probes of the subject invention may be derived from the nucleotide sequence SEQ ID NO: 796. Because the corresponding gene is only expressed in a limited number of tissues, a hybridization probe derived from the nucleotide sequence SEQ ID NO: 796 can be used as an indicator of the presence of RNA of cell type of such a tissue in a sample.

[0432] Any suitable hybridization technique can be employed, such as, for example, in situ hybridization. PCR as described in U.S. Pat. Nos. 4,683,195 and 4,965,188 provides additional uses for oligonucleotides based upon the nucleotide sequences. Such probes used in PCR may be of recombinant origin, may be chemically synthesized, or a mixture of both. The probe will comprise a discrete nucleotide sequence for the detection of identical sequences or a degenerate pool of possible sequences for identification of closely related genomic sequences.

[0433] Other means for producing specific hybridization probes for nucleic acids include the cloning of nucleic acid sequences into vectors for the production of mRNA probes. Such vectors are known in the art and are commercially available and may be used to synthesize RNA probes in vitro by means of the addition of the appropriate RNA polymerase as T7 or SP6 RNA polymerase and the appropriate radioactively labeled nucleotides. The nucleotide sequences may be used to construct hybridization probes for mapping their respective genomic sequences. The nucleotide sequence provided herein may be mapped to a chromosome or specific regions of a chromosome using well known genetic and/or chromosomal mapping techniques. These techniques include in situ hybridization, linkage analysis against known chromosomal markers, hybridization screening with libraries or flow-sorted chromosomal preparations specific to known chromosomes, and the like. The technique of fluorescent in situ hybridization of chromosome spreads has been described, among other places, in Verma et al (1988) Human Chromosomes: A Manual of Basic Techniques, Pergamon Press, New York N.Y.

[0434] Fluorescent in situ hybridization of chromosomal preparations and other physical chromosome mapping techniques may be correlated with additional genetic map data. Examples of genetic map data can be found in the 1994 Genome Issue of Science (265:1981f). Correlation between the location of a nucleic acid on a physical chromosomal map and a specific disease (or predisposition to a specific disease) may help delimit the region of DNA associated with that genetic disease. The nucleotide sequences of the subject invention may be used to detect differences in gene sequences between normal, carrier or affected individuals.

[0435] 4.20 Preparation of Support Bound Oligonucleotides

[0436] Oligonucleotides, i.e., small nucleic acid segments, may be readily prepared by, for example, directly synthesizing the oligonucleotide by chemical means, as is commonly practiced using an automated oligonucleotide synthesizer.

[0437] Support bound oligonucleotides may be prepared by any of the methods known to those of skill in the art using any suitable support such as glass, polystyrene or Teflon. One strategy is to precisely spot oligonucleotides synthesized by standard synthesizers. Immobilization can be achieved using passive adsorption (Inouye & Hondo, J. Clin. Microbiol. 28:1469-72 (1990)); using UV light (Nagata et al., 1985; Dahlen et al., 1987; Morrissey & Collins, Mol. Cell Probes 3:189-207 (1989)) or by covalent binding of base modified DNA (Keller et al., 1988; 1989); all references being specifically incorporated herein.

[0438] Another strategy that may be employed is the use of the strong biotin-streptavidin interaction as a linker. For example, Broude et al. Proc. Natl. Acad. Sci. USA 91:3072-6 (1994), describe the use of biotinylated probes, although these are duplex probes, that are immobilized on streptavidin-coated magnetic beads. Streptavidin-coated beads may be purchased from Dynal, Oslo. Of course, this same linking chemistry is applicable to coating any surface with streptavidin. Biotinylated probes may be purchased from various sources, such as, e.g., Operon Technologies (Alameda, Calif.).

[0439] Nunc Laboratories (Naperville, Ill.) is also selling suitable material that could be used. Nunc Laboratories have developed a method by which DNA can be covalently bound to the microwell surface termed Covalink NH. CovaLink NH is a polystyrene surface grafted with secondary amino groups (>NH) that serve as bridge-heads for further covalent coupling. CovaLink Modules may be purchased from Nunc Laboratories. DNA molecules may be bound to CovaLink exclusively at the 5′-end by a phosphoramidate bond, allowing immobilization of more than 1 pmol of DNA (Rasmussen et al., Anal. Biochem. 198:138-42 (1991)).

[0440] The use of CovaLink NH strips for covalent binding of DNA molecules at the 5′-end has been described (Rasmussen et al., (1991). In this, technology, a phosphoramidate bond is employed (Chu et al., Nucleic Acids Res. 11:6513-29 (1983)). This is beneficial as immobilization using only a single covalent bond is preferred. The phosphoramidate bond joins the DNA to the CovaLink NH secondary amino groups that are positioned at the end of spacer arms covalently grafted onto the polystyrene surface through a 2 nm long spacer arm. To link an oligonucleotide to CovaLink NH via a phosphoramidate bond, the oligonucleotide terminus must have a 5′-end phosphate group. It is, perhaps, even possible for biotin to be covalently bound to CovaLink and then streptavidin used to bind the probes.

[0441] More specifically, the linkage method includes dissolving DNA in water (7.5 ng/μl) and denaturing for 10 min. at 95° C. and cooling on ice for 10 min. Ice-cold 0.1 M 1-methylimidazole, pH 7.0 (1-MeIm₇), is then added to a final concentration of 10 mM 1-MeIm₇. A ss DNA solution is then dispensed into CovaLink NH strips (75 μl/well) standing on ice.

[0442] Carbodiimide 0.2 M 1-ethyl-3-(3-dimethylaminopropyl)-carbodiimide (EDC), dissolved in 10 mM 1-MeIm₇, is made fresh and 25 ul added per well. The strips are incubated for 5 hours at 50° C. After incubation the strips are washed using, e.g., Nunc-Immuno Wash; first the wells are washed 3 times, then they are soaked with washing solution for 5 min., and finally they are washed 3 times (where in the washing solution is 0.4 N NaOH, 0.25% SDS heated to 50° C.).

[0443] It is contemplated that a further suitable method for use with the present invention is that described in PCT Patent Application WO 90/03382 (Southern & Maskos), incorporated herein by reference. This method of preparing an oligonucleotide bound to a support involves attaching a nucleoside 3′-reagent through the phosphate group by a covalent phosphodiester link to aliphatic hydroxyl groups carried by the support. The oligonucleotide is then synthesized on the supported nucleoside and protecting groups removed from the synthetic oligonucleotide chain under standard conditions that do not cleave the oligonucleotide from the support. Suitable reagents include nucleoside phosphoramidite and nucleoside hydrogen phosphorate.

[0444] An on-chip strategy for the preparation of DNA probe for the preparation of DNA probe arrays may be employed. For example, addressable laser-activated photodeprotection may be employed in the chemical synthesis of oligonucleotides directly on a glass surface, as described by Fodor et al. Science 251:767-73 (1991), incorporated herein by reference. Probes may also be immobilized on nylon supports as described by Van Ness et al. Nucleic Acids Res. 19:3345-50 (1991); or linked to Teflon using the method of Duncan & Cavalier Anal. Biochem. 169:104-8 (1988); all references being specifically incorporated herein.

[0445] To link an oligonucleotide to a nylon support, as described by Van Ness et al. (1991), requires activation of the nylon surface via alkylation and selective activation of the 5′-amine of oligonucleotides with cyanuric chloride.

[0446] One particular way to prepare support bound oligonucleotides is to utilize the light-generated synthesis described by Pease et al., Proc. Natl. Acad. Sci. USA 91:5022-6 (1994), incorporated herein by reference). These authors used current photolithographic techniques to generate arrays of immobilized oligonucleotide probes (DNA chips). These methods, in which light is used to direct the synthesis of oligonucleotide probes in high-density, miniaturized arrays, utilize photolabile 5′-protected N-acyl-deoxynucleoside phosphoramidites, surface linker chemistry and versatile combinatorial synthesis strategies. A matrix of 256 spatially defined oligonucleotide probes may be generated in this manner.

[0447] 4.21 Preparation of Nucleic Acid Fragments

[0448] The nucleic acids may be obtained from any appropriate source, such as cDNAs, genomic DNA, chromosomal DNA, microdissected chromosome bands, cosmid or YAC inserts, and RNA, including mRNA without any amplification steps. For example, Sambrook et al. (1989) describes three protocols for the isolation of high molecular weight DNA from mammalian cells (p. 9.14-9.23).

[0449] DNA fragments may be prepared as clones in M13, plasmid or lambda vectors and/or prepared directly from genomic DNA or cDNA by PCR or other amplification methods. Samples may be prepared or dispensed in multiwell plates. About 100-1000 ng of DNA samples may be prepared in 2-500 ml of final volume.

[0450] The nucleic acids would then be fragmented by any of the methods known to those of skill in the art including, for example, using restriction enzymes as described at 9.24-9.28 of Sambrook et al. (1989), shearing by ultrasound and NaOH treatment.

[0451] Low pressure shearing is also appropriate, as described by Schriefer et al. Nucl. Acids Res. 18:7455-6 (1990), incorporated herein by reference). In this method, DNA samples are passed through a small French pressure cell at a variety of low to intermediate pressures. A lever device allows controlled application of low to intermediate pressures to the cell. The results of these studies indicate that low-pressure shearing is a useful alternative to sonic and enzymatic DNA fragmentation methods.

[0452] One particularly suitable way for fragmenting DNA is contemplated to be that using the two base recognition endonuclease, CviJI, described by Fitzgerald et al. Nucl. Acids Res. 20:3753-62 (1992). These authors described an approach for the rapid fragmentation and fractionation of DNA into particular sizes that they contemplated to be suitable for shotgun cloning and sequencing.

[0453] The restriction endonuclease CviJI normally cleaves the recognition sequence PuGCPy between the G and C to leave blunt ends. Atypical reaction conditions, which alter the specificity of this enzyme (CviJI**), yield a quasi-random distribution of DNA fragments form the small molecule pUC19 (2688 base pairs). Fitzgerald et al. (1992) quantitatively evaluated the randomness of this fragmentation strategy, using a CviJI** digest of pUC19 that was size fractionated by a rapid gel filtration method and directly ligated, without end repair, to a lac Z minus M13 cloning vector. Sequence analysis of 76 clones showed that CviJI** restricts pyGCPy and PuGCPu, in addition to PuGCPy sites, and that new sequence data is accumulated at a rate consistent with random fragmentation.

[0454] As reported in the literature, advantages of this approach compared to sonication and agarose gel fractionation include: smaller amounts of DNA are required (0.2-0.5 μg instead of 2-5 μg); and fewer steps are involved (no preligation, end repair, chemical extraction, or agarose gel electrophoresis and elution are needed

[0455] Irrespective of the manner in which the nucleic acid fragments are obtained or prepared, it is important to denature the DNA to give single stranded pieces available for hybridization. This is achieved by incubating the DNA solution for 2-5 minutes at 80-90° C. The solution is then cooled quickly to 2° C. to prevent renaturation of the DNA fragments before they are contacted with the chip. Phosphate groups must also be removed from genomic DNA by methods known in the art.

[0456] 4.22 Preparation of DNA Arrays

[0457] Arrays may be prepared by spotting DNA samples on a support such as a nylon membrane. Spotting may be performed by using arrays of metal pins (the positions of which correspond to an array of wells in a microtiter plate) to repeated by transfer of about 20 nl of a DNA solution to a nylon membrane. By offset printing, a density of dots higher than the density of the wells is achieved. One to 25 dots may be accommodated in 1 mm², depending on the type of label used. By avoiding spotting in some preselected number of rows and columns, separate subsets (subarrays) may be formed. Samples in one subarray may be the same genomic segment of DNA (or the same gene) from different individuals, or may be different, overlapped genomic clones. Each of the subarrays may represent replica spotting of the same samples. In one example, a selected gene segment may be amplified from 64 patients. For each patient, the amplified gene segment may be in one 96-well plate (all 96 wells containing the same sample). A plate for each of the 64 patients is prepared. By using a 96-pin device, all samples may be spotted on one 8×12 cm membrane. Subarrays may contain 64 samples, one from each patient. Where the 96 subarrays are identical, the dot span may be 1 mm² and there may be a 1 mm space between subarrays.

[0458] Another approach is to use membranes or plates (available from NUNC, Naperville, Ill.) which may be partitioned by physical spacers e.g. a plastic grid molded over the membrane, the grid being similar to the sort of membrane applied to the bottom of multiwell plates, or hydrophobic strips. A fixed physical spacer is not preferred for imaging by exposure to flat phosphor-storage screens or x-ray films.

[0459] The present invention is illustrated in the following examples. Upon consideration of the present disclosure, one of skill in the art will appreciate that many other embodiments and variations may be made in the scope of the present invention. Accordingly, it is intended that the broader aspects of the present invention not be limited to the disclosure of the following examples. The present invention is not to be limited in scope by the exemplified embodiments which are intended as illustrations of single aspects of the invention, and compositions and methods which are functionally equivalent are within the scope of the invention. Indeed, numerous modifications and variations in the practice of the invention are expected to occur to those skilled in the art upon consideration of the present preferred embodiments. Consequently, the only limitations which should be placed upon the scope of the invention are those which appear in the appended claims.

[0460] All references cited within the body of the instant specification are hereby incorporated by reference in their entirety.

### 5.0 EXAMPLES

### Example 1

### Isolation of SEQ. ID NO: 796 from a cDNA Library

[0461] A plurality of novel nucleic acids including SEQ ID NO: 796 were obtained from cDNA libraries prepared from various human tissues and in some cases isolated from a genomic library derived from human chromosome using standard PCR, SBH sequence signature analysis and Sanger sequencing techniques. The inserts of the library were amplified with PCR using primers specific for the vector sequences which flank the inserts. Clones from cDNA libraries were spotted on nylon membrane filters and screened with oligonucleotide probes (e.g., 7-mers) to obtain signature sequences. The clones were clustered into groups of similar or identical sequences. Representative clones were selected for sequencing.

[0462] In some cases, the 5′ sequence of the amplified inserts was then deduced using a typical Sanger sequencing protocol. PCR products were purified and subjected to fluorescent dye terminator cycle sequencing. Single pass gel sequencing was done using a 377 Applied Biosystems (ABI) sequencer to obtain the novel nucleic acid sequences. In some cases RACE (Random Amplification of cDNA Ends) was performed to further extend the sequence in the 5′ direction.

### Example 2

### Assemblage of SEQ ID NO: 796

[0463] The novel nucleic acids of the present invention including SEQ ID NO: 796 were assembled from sequences that were obtained from a cDNA library by methods described in Example 1 above, and in some cases sequences obtained from one or more public databases. The nucleic acids were assembled using an EST sequence as a seed. Then a recursive algorithm was used to extend the seed EST into an extended assemblage, by pulling additional sequences from different databases (i.e., Hyseq's database containing EST sequences, dbEST version 119, gb pri 119, and UniGene version 119) that belong to this assemblage. The algorithm terminated when there was no additional sequences from the above databases that would extend the assemblage. Inclusion of component sequences into the assemblage was based on a BLASTN hit to the extending assemblage with BLAST score greater than 300 and percent identity greater than 95%.

[0464] Using PHRAP (Univ. of Washington) or CAP4 (Paracel), a full length gene cDNA sequence and its corresponding protein sequence were generated from the assemblage. Any frame shifts and incorrect stop codons were corrected by hand editing. During editing, the sequence was checked using FASTY and/or BLAST against Genbank (i.e., dbEST version 121, gb pri 121, UniGene version 121, Genpept release 121). Other computer programs which may have been used in the editing process were phredPhrap and Consed (University of Washington) and ed-ready, ed-ext and cg-zip-2 (Hyseq, Inc.). The full-length nucleotide (SEQ ID NO: 796) and amino acid (SEQ ID NO: 949) sequences, including splice variants resulting from these procedures are shown in the Sequence Listing. Tables 1 through 5 from U.S. application Ser. No. 10/225,251 containing tissue source, BLASTP homology, eMatrix signature regions, pfam domains, and signal peptide location, respectively, for the full-length nucleotide and amino acid sequences in the Sequence Listing are herein incorporated by reference in their entirety. Tables 1 through 8 from PCT Application Serial No. PCT/US/02/05095 containing tissue source, BLASTP homology, eMatrix signatures, pfam domains, three-dimensional modeling results, signal peptide location, chromosomal location, and SEQ ID NO: correlation table, respectively, for the full-length nucleotide and amino acid sequences in the Sequence Listing are herein incorporated by reference in their entirety.

[0465] Table 1 shows the various tissue sources of SEQ ID NO: 796.

TABLE 1

| | | HYSEQ | |
|---|---|---|---|
| | Library/RNA | Library | |
| Tissue Origin | Source | Name | SEQ ID NO: |
| adult liver | Clontech | ALV003 | 796 |
| fetal liver-spleen | Columbia | FLS002 | 796 |
| | University | | |

[0466] The homology for SEQ ID NO: 796 were obtained by a BLASTP version 2.0al 19MP-WashU search against Genpept release 120 and the amino acid version of Geneseq released on Oct. 26, 2000, using BLAST algorithm. The results showed homologues for SEQ ID NO: 949 from Genpept. The homologues with identifiable functions for SEQ ID NO: 949 are shown in Table 2 below.

TABLE 2

| SEQ | | | Smith- | |
|---|---|---|---|---|
| ID | Accession | | Waterman | % |
| NO: | No. | Description | Score | Identity |
| 949 | M83751 | Homo sapiens arginine-rich | 525 | 62 |
| | | protein | | |
| 949 | gi13938307 | Homo sapiens clone MGC: | 526 | 62 |
| | | 15626 IMAGE: 3343642, | | |
| | | mRNA, complete cds. | | |
| 949 | AAB90765 | Homo sapiens NOJI/Human | 524 | 64 |
| | | shear stress-response protein | | |
| | | SEQ ID NO: 30. | | |
| 949 | AAB62159 | Homo sapiens NEUR-Human | 524 | 64 |
| | | arginine-rich protein. | | |

[0467] Using eMatrix software package (Stanford University, Stanford, Calif.) (Wu et al., J. Comp. Biol., 6:219-235 (1999) herein incorporated by reference), all the sequences were examined to determine whether they had identifiable signature regions. Table 3 shows the signature region found in the indicated polypeptide sequences, the description of the signature, the eMatrix p-value(s) and the position(s) of the signature within the polypeptide sequence.

TABLE 3

| SEQ | Accession | | |
|---|---|---|---|
| ID NO: | No. | Description | Results* |
| 949 | IPB0025587F | I/LWEQ domain | 14.64 3.09e−08 117-147 |

*Results include in order: accession number subtype; raw score; p-value; position of signature in amino acid sequence.

[0468] Using the pFam software program (Sonnhammer et al., Nucleic Acids Res., 26:320-322 (1998) herein incorporated by reference) all the polypeptide sequences were examined for domains with homology to certain peptide domains.

[0469] The nucleotide sequence within the sequences that codes for signal peptide sequences and their cleavage sites can be determined from using Neural Network SignalP V1.1 program (from Center for Biological Sequence Analysis, The Technical University of Denmark). The process for identifying prokaryotic and eukaryotic signal peptides and their cleavage sites are also disclosed by Henrik Nielson, Jacob Engelbrecht, Soren Brunak, and Gunnar von Heijne in the publication “Identification of prokaryotic and eukaryotic signal peptides and prediction of their cleavage sites” Protein Engineering, Vol. 10, no. 1, pp. 1-6 (1997), incorporated herein by reference. A maximum S score and a mean S score, as described in the Nielson et al. reference, was obtained for the polypeptide sequences. Table 4 shows the position of the signal peptide in each of the polypeptides and the maximum score and mean score associated with that signal peptide.

TABLE 4

| | Position of Signal | | |
|---|---|---|---|
| | in Amino Acid | maxS (Maximum | meanS (Mean |
| SEQ ID NO: | Sequence | score) | score) |
| 949 | 1-26 | 0.984 | 0.746 |

### Example 3

### Induction of Protein Phosphorylation and Cytokine/Chemokine Activation

### A. SEQ ID NO: 949 is a Secreted Protein

[0470] The full-length open reading frame of SEQ ID NO: 796 was cloned into the mammalian expression vector pCDNA3.1/V5-His-Topo (Invitrogen, Carlsbad, Calif.) to generate a C-terminal V5-His tagged expression construct. The resulting plasmid was transiently transfected into COS7L cells using the Fugene-6 transfection reagent (Roche Biosciences). The presence of the V5-His tagged protein was determined in both culture supernatant and cell lysate by Western blot using anti-V5 antibodies and chemiluminescence visualization. The percent secretion was determined by comparing the amount of protein in the supernatant to the amount of protein in the cell lysate. The results indicate that the secretion level of the protein SEQ ID NO: 949 was estimated as high (more than 50%). Thus, consistent with the existence of a signal peptide, secretion studies confirm that the arginine-rich-like polypeptide of SEQ ID NO: 949 is a secreted protein, similar to other members of the growth regulatory protein family.

### B. Detection of Intracellular Protein Phosphorylation

[0471] The assay described below, a Bio-Plex (Bio-Rad, Hercules, Calif.) phosphoprotein assay, is one of several methods employed for measuring protein phosphorylation in order to assess potential functions of secreted proteins in the particular cell type tested. Briefly, purified antibodies against various protein kinases, JNK, p38MAPK, erk, Stat3, and IκBα, were conjugated to microsphere sets according to the manufacturer's protocol. Culture supernatant from COS7L cells, transiently transfected with an expression plasmid containing a V5-His tagged fusion protein of SEQ ID NO: 949 (see Example 3A), was harvested and 10 μl of the culture supernatant was added to a panel of target cell lines for 15 min at 37° C. Cells were lysed and the lysate was clarified. The conjugated microspheres were incubated with 25 μl of cell lysate in a final volume of 50 μl in a 96-well plate overnight at room temperature with constant shaking. After incubation, the microspheres were washed with Tris buffered saline containing 0.02% Tween-20 (TBST). Protein phosphorylation was detected by incubating the microspheres with 25 μl of a mixture of biotinylated antibodies against the phosphorylated forms of the protein kinases, for example, anti-phospho-Stat3, in TBST containing 5% mouse serum at room temperature for 30 min with constant shaking. The microspheres were washed with TBST and further incubated with 2 μg/ml of streptavidin-phycoerythrin (PE). The resulting microspheres with the reaction complex were analyzed using the Luminex Reader (Luminex Co., Austin, Tex.). The phosphoprotein assay results are shown in Table 5 below:

TABLE 5

| Cell Type* | Analyte | Stimulation |
|---|---|---|
| PC-12 | Stat3 | + |
| PC-12 | p38MAPK | + |
| SK-N-MC | Stat3 | + |
| SK-N-MC | p38MAPK | + |

*PC-12 (pheochromocytoma, adrenal gland), SK-N-MC (neuroepithelioma, brain)

[0472] Stat3 is a transcription factor phosphorylated by the Janus family tyrosine kinase (JAK) in response to cytokine activation, and induces progression through the cell cycle, prevents apoptosis and may play a role in normal and cancer cell development (Bromberg, et al., Cell 98:295-303 (1999); Levy and Lee J. Clin. Invest. 109:1143-1148 (2002), both of which are herein incorporated by reference). It has been shown that, in α1A-adrenergic receptor transfected PC12 cells, norepinephrine stimulates the cells to differentiate into a neuronal like phenotype, a effect similar to nerve growth factor (Williams et al., J. Biol. Chem. 273:24624-24632 (1998), Zhong and Minneman, Biochem. J. 344:889-894 (1999); Zhong and Minneman, J. Neurochem. 72:2388-2396 (1999), all of which are herein incoroporated by reference). This stimulating effect involves stat1 and stat3 phosphorylation which is inhibited by a p38MAPK inhibitor SB202190 (Zhong et al., Molec. Pharm. 57:961-967 (2000), herein incorporated by reference). The findings that the protein of SEQ ID NO: 949 stimulated the phosphorylation of p38MAPK and stat3 phosphorylation in PC12 cells strongly suggest that this protein is a growth regulatory protein that stimulates differentiation of PC-12 cells.

### C. Detection of Cytokine/Chemokine Levels

[0473] Cytokine and chemokine levels are determined using the assay described below, the Luminex Multi-plex bead assay, which is very similar to a typical sandwich ELISA assay, but utilizes Luminex microspheres conjugated to anti-cytokine and anti-chemokine antibodies (Vignali, J. Immunol. Methods 243:243-255 (2000), herein incorporated by reference). Briefly, purified antibodies against a variety of cytokines and chemokines were conjugated to microsphere sets (Luminex Co., Austin, Tex.) according to the manufacturer's protocol. Culture supernatant from COS7L cells, transiently transfected with an expression plasmid containing a V5-His tagged fusion protein of SEQ ID NO: 949 (see Example 3A), was harvested and 25 μl of the culture supernatant was added to a panel of target cell lines and incubated overnight at 37° C. Condition media were then harvested. The conjugated microspheres were incubated with 50 μl of condition media in a final volume of 50 μl in a 96-well filter plate at room temperature for 30 min with constant shaking. After incubation, the microspheres were washed and incubated with 50 μl (1 μg/ml) of biotinylated anti-cytokine or anti-chemokine antibodies in phosphate buffered saline (PBS) containing 0.5% Tween-20, 0.2% BSA, 5% mouse serum at room temperature for 30 min. The microspheres were washed and further incubated with 2 μg/ml of Streptavidin-PE. The resulting microspheres with the reaction complex were analyzed using the Luminex Reader (Luminex Co., Austin, Tex.). The results of the cytokine assay are shown in Table 6 below:

TABLE 6

| Cell Type* | Analyte** | Stimulation |
|---|---|---|
| Jurkat | VEGF | + |
| HUVEC | VEGF | + |
| THP-1 | VEGF | + |

*HUVEC (human umbilical cord epithelial cell line), Jurkat (acute T cell leukemia cell line), THP-1 (acute monocytic leukemia cell line).
**VEGF (vascular endothelial growth factor).

[0474] The finding that SEQ ID NO: 949 increased secretion of VEGF, a strong angiogenic protein, suggests that the polypeptide of SEQ ID NO: 949 is a growth regulatory protein and can play a role in angiogenesis-associated disorders such as tumor growth, rheumatoid arthritis and wound healing.

### Example 4

### Production of Anti-Arp-like Antibodies

[0475] Cells expressing ARP-like protein are identified using anti-ARP-like antibodies. Polyclonal antibodies are produced by DNA vaccination or by injection of peptide antigens into rabbits or other hosts. An animal, such as a rabbit, is immunized with a peptide from the extracellular region of ARP-like protein conjugated to a carrier protein, such as BSA (bovine serum albumin) or KLH (keyhole limpet hemocyanin). The rabbit is initially immunized with conjugated peptide in complete Freund's adjuvant, followed by a booster shot every two weeks with injections of conjugated peptide in incomplete Freund's adjuvant. Anti-ARP-like antibody is affinity purified from rabbit serum using ARP-like peptide coupled to Affi-Gel 10 (Bio-Rad), and stored in PBS with 0.1% sodium azide. To determine that the polyclonal antibodies are ARP-like-specific, an expression vector encoding ARP-like protein is introduced into mammalian cells. Western blot analysis of protein extracts of non-transfected cells and the ARP-like-containing cells is performed using the polyclonal antibody sample as the primary antibody and a horseradish peroxidase-labeled anti-rabbit antibody as the secondary antibody. Detection of an approximately 21 kD band in the ARP-like-containing cells and lack thereof in the control cells indicates that the polyclonal antibodies are specific for ARP-like protein.

[0476] Monoclonal antibodies are produced by injecting mice with an ARP-like peptide, with or without adjuvant. Subsequently, the mouse is boosted every 2 weeks until an appropriate immune response has been identified (typically 1-6 months), at which point the spleen is removed. The spleen is minced to release splenocytes, which are fused (in the presence of polyethylene glycol) with murine myeloma cells. The resulting cells (hybridomas) are grown in culture and selected for antibody production by clonal selection. The antibodies are secreted into the culture supernatant, facilitating the screening process, such as screening by an enzyme-linked immunosorbent assay (ELISA). Alternatively, humanized monoclonal antibodies are produced either by engineering a chimeric murine/human monoclonal antibody in which the murine-specific antibody regions are replaced by the human counterparts and produced in mammalian cells, or by using transgenic “knock out” mice in which the native antibody genes have been replaced by human antibody genes and immunizing the transgenic mice as described above.

### Example 5

### In vitro Antibody-dependent Cytotoxicity Assay

[0477] The ability of an ARP-like-specific antibody to induce antibody-dependent cell-mediated cytoxicity (ADCC) is determined in vitro. ADCC is performed using the CytoTox 96 Non-Radioactive Cytoxicity Assay (Promega; Madison, Wis.) (Hornick et al., Blood 89:4437-4447, (1997), herein incorporated by reference) as well as effector and target cells. Peripheral blood mononuclear cells (PBMC) or neutrophilic polymorphonuclear leukocytes (PMN) are two examples of effector cells that can be used in this assay. PBMC are isolated from healthy human donors by Ficoll-Paque gradient centrifugation, and PMN are purified by centrifugation through a discontinuous percoll gradient (70% and 62%) followed by hypotonic lysis to remove residual erythrocytes. RA1 B cell lymphoma cells (for example) are used as target cells.

[0478] RA1 cells are suspended in RPMI 1640 medium supplemented with 2% fetal bovine serum and plated in 96-well V-bottom microtitier plates at 2×10⁴ cells/well. ARP-like-specific antibody is added in triplicate to individual wells at 1 μg/ml, and effector cells are added at various effector:target cell ratios (12.5:1 to 50:1). The plates are incubated for 4 hours at 37° C. The supernatants are then harvested, lactate dehydrogenase release determined, and percent specific lysis calculated using the manufacture's protocols.

### Example 6

### Immunotherapy Using ARP-like-specific Antibodies

[0479] Animal models are used to evaluate the effect of ARP-like-specific antibodies as targets for antibody-based immunotherapy using monoclonal antibodies. Human myeloma cells are injected into the tail vein of 5-6 week old nude mice whose natural killer cells have been eradicated. To evaluate the ability of ARP-like-specific antibodies in preventing tumor growth, mice receive an intraperitoneal injection with ARP-like-specific antibodies either 1 or 15 days after tumor inoculation followed by either a daily dose of 20 μg or 100 μg once or twice a week, respectively (Ozaki, et al., Blood 90:3179-3186 (1997), herein incorporated by reference). Levels of human IgG (from the immune reaction caused by the human tumor cells) are measured in the murine sera by ELISA.

[0480] The effect of ARP-like-specific antibodies on the proliferation of myeloma cells is examined in vitro using a ³H-thymidine incorporation assay (Ozaki et al., supra). Cells are cultured in 96-well plates at 1×10⁵ cells/ml in 100 μl/well and incubated with various amounts of ARP-like antibody or control IgG (up to 100 μg/ml) for 24 h. Cells are incubated with 0.5 μCi ³H-thymidine (New England Nuclear, Boston, Mass.) for 18 h and harvested onto glass filters using an automatic cell harvester (Packard, Meriden, Conn.). The incorporated radioactivity is measured using a liquid scintillation counter.

[0481] The cytotoxicity of the ARP-like monoclonal antibody is examined by the effect of complements on myeloma cells using a ⁵¹Cr-release assay (Ozaki et al., supra). Myeloma cells are labeled with 0.1 mCi ⁵¹Cr-sodium chromate at 37° C. for 1 h. ⁵¹Cr-labeled cells are incubated with various concentrations of ARP-like monoclonal antibody or control IgG on ice for 30 min. Unbound antibody is removed by washing with medium. Cells are distributed into 96-well plates and incubated with serial dilutions of baby rabbit complement at 37° C. for 2 h. The supernatants are harvested from each well and the amount of ⁵¹Cr released is measured using a gamma counter. Spontaneous release of ⁵¹Cr is measured by incubating cells with medium alone, whereas maximum ⁵¹Cr release is measured by treating cells with 1% NP-40 to disrupt the plasma membrane. Percent cytotoxicity is measured by dividing the difference of experimental and spontaneous ⁵¹Cr release by the difference of maximum and spontaneous ⁵¹Cr release.

[0482] Antibody-dependent cell-mediated cytotoxicity (ADCC) for the ARP-like monoclonal antibody is measured using a standard 4 h ⁵¹Cr-release assay (Ozaki et al., supra). Splenic mononuclear cells from SCID mice are used as effector cells and cultured with or without recombinant interleukin-2 (for example) for 6 days. ⁵¹Cr-labeled target myeloma cells (1×10⁴ cells) are placed in 96-well plates with various concentrations of anti-ARP-like monoclonal antibody or control IgG. Effector cells are added to the wells at various effector to target ratios (12.5:1 to 50:1). After 4 h, culture supernatants are removed and counted in a gamma counter. The percentage of cell lysis is determined as above.

### Example 7

### Diagnostic Methods to Detect ARP-like Expression

[0483] Expression of ARP-like mRNA in tissue samples (normal or diseased) is detected using quantitative real-time PCR analysis in which poly-A RNA is isolated from the tissues. The polyA+RNA is subjected to quantitative, real-time PCR analysis (Simpson, et al., Molec. Vision. 6: 178-183 (2000), herein incorporated by reference) to determine the relative copy number of ARP-like mRNA expressed per cell in each line. DNA sequences targeting a housekeeping gene, such as Elongation factor 1, is used as a positive control and normalization factors in all samples.

[0484] Expression of ARP-like protein can be detected by immunoblot analysis using ARP-like antibodies. Cells isolated from tumors are cultured as primary cells and the culture supernatant is collected and analyzed using the anti-ARP-like antibodies. Alternatively, plasma samples from patients are collected and analyzed by immunoblotting using ARP-like antibodies to detect the presence or overexpression of ARP-like protein.

What is claimed is:

1. An isolated polynucleotide comprising a nucleotide sequence of SEQ ID NO: 796, a mature protein coding portion of SEQ ID NO: 796, an active domain coding protein of SEQ ID NO: 796, and complementary sequences thereof.

2. An isolated polynucleotide encoding a polypeptide with biological activity, wherein said polynucleotide has greater than about 90% sequence identity with the polynucleotide of claim 1.

3. The polynucleotide of claim 1 wherein said polynucleotide is DNA.

4. An isolated polynucleotide of claim 1 wherein said polynucleotide comprises the complementary sequences.

5. A vector comprising the polynucleotide of claim 1.

6. An expression vector comprising the polynucleotide of claim 1.

7. A host cell genetically engineered to comprise the polynucleotide of claim 1.

8. A host cell genetically engineered to comprise the polynucleotide of claim 1 operatively associated with a regulatory sequence that modulates expression of the polynucleotide in the host cell.

9. An isolated polypeptide, wherein the polypeptide is encoded by the polynucleotide of claim 1.

10. A composition comprising the polypeptide of claim 9 and a carrier.

11. An antibody directed against the polypeptide of claim 9.

12. A method for detecting the polynucleotide of claim 1 in a sample, comprising:
a) contacting the sample with a compound that binds to and forms a complex with the polynucleotide of claim 1 for a period sufficient to form the complex; and
b) detecting the complex, so that if a complex is detected, the polynucleotide of claim 1 is detected.

13. A method for detecting the polynucleotide of claim 1 in a sample, comprising:
a) contacting the sample under stringent hybridization conditions with nucleic acid primers that anneal to the polynucleotide of claim 1 under such conditions;
b) amplifying a product comprising at least a portion of the polynucleotide of claim 1; and
c) detecting said product and thereby the polynucleotide of claim 1 in the sample.

14. The method of claim 13, wherein the polynucleotide is an RNA molecule and the method further comprises reverse transcribing an annealed RNA molecule into a cDNA polynucleotide.

15. A method for detecting the polypeptide of claim 9 in a sample, comprising:
a) contacting the sample with a compound that binds to and forms a complex with the polypeptide under conditions and for a period sufficient to form the complex; and
b) detecting formation of the complex, so that if a complex formation is detected, the polypeptide of claim 9 is detected.

16. A method for identifying a compound that binds to the polypeptide of claim 9, comprising:
a) contacting the compound with the polypeptide of claim 9 under conditions sufficient to form a polypeptide/compound complex; and
b) detecting the complex, so that if the polypeptide/compound complex is detected, a compound that binds to the polypeptide of claim 9 is identified.

17. A method for identifying a compound that binds to the polypeptide of claim 9, comprising:
a) contacting the compound with the polypeptide of claim 9, in a cell, under conditions sufficient to form a polypeptide/compound complex, wherein the complex drives expression of a reporter gene sequence in the cell; and
b) detecting the complex by detecting reporter gene sequence expression, so that if the polypeptide/compound complex is detected, a compound that binds to the polypeptide of claim 9 is identified.

18. A method of producing the polypeptide of claim 9, comprising, a) culturing a host cell comprising a polynucleotide sequence selected from the group consisting of a polynucleotide sequence of SEQ ID NO: 796, a mature protein coding portion of SEQ ID NO: 796, an active domain coding portion of SEQ ID NO: 796, complementary sequences thereof, under conditions sufficient to express the polypeptide in said cell; and
b) isolating the polypeptide from the cell culture or cells of step (a).

19. An isolated polypeptide comprising an amino acid sequence of SEQ ID NO: 949, the mature protein portion thereof, or the active domain thereof.

20. The polypeptide of claim 21 wherein the polypeptide is provided on a polypeptide array.

21. A method of treatment comprising administering to a mammalian subject in need thereof a therapeutic amount of a composition comprising a polypeptide of claim 9 or 19 and a pharmaceutically acceptable carrier.

22. A method of treatment comprising administering to a mammalian subject in need thereof a therapeutic amount of a composition comprising an antibody that specifically binds to a polypeptide of claim 9 or 19 and a pharmaceutically acceptable carrier.

The application's sequence listing, which the Patent Office published only in electronic form, follows.

SEQUENCE LISTING (950 sequences)

SEQ ID NO: 1 - DNA, 1850 bp, Homo sapiens
  CDS (647)..(1030)
ggaacgcgcaccaccggccttcaccccttagggcgcgggaggggacgcaggggaaatcgaagctgccagatgcccacgaccacaacgtcaccctccagattgccctctcggaggggcccagtccgcgcaggtggctgctccctactgcctgagctgtggctgagcagcagattggggagaaacaggctctcgcaccttgtcctttattcgacgatttcttcaatggacagaattattagatcctacaaatgtgttcatttcagttgaaagtatagaaaactcgaggcaactattgtgcacaaatgaagatgtttccagccctgcctcggcggaccaaaggatacaggaagcttggaagcggagtcttgcaacagtgcatcccgacagcagcaacctgatccccaagctttttcgacctgcagcgttcctgcctttcatggcgcccacggtatttttgtcaatgacgccactgaaagggatcaagtccgtgattttacctcaggttttcctctgtgcctacatggcagcgttcaacagcatcaatggaaacagaagttacacttgtaagccactagaaagatcattactaatggcgggagccgttgcttcttcaactttcttaggagtaatccctcagtttgtccagatgaagtatggcctgactggcccttggattaaaagactcttacctgtgatcttcctcgtgcaagccagtggaatgaatgtctacatgtcccgaagtcttgaatccattaaggggattgcggtcatggacaaggaaggcaatgtcctgggtcattccagaattgctgggacaaaggctgttagagaaacgctagcatccagaatagtgctgtttgggacctcagctctgattcctgaagtcttcacctacttttttaaaaggacccagtatttcaggaaaaacccagggtcattgtggattttgaaactgtcttgtactgtcctggcaatgggactgatggtgccattttcttttagtatatttccacagattggacaggtgacatgacatgagaattgccttaaaatactcaaggaaaaaaatcctactgctgggtgtgggaggtgcttgatgaaatgagatctgcaaattgttaatagtgattcctgagtgagcacatatacagtactgtagtcttgaagagaaaattcagtctccaacagaagaaacagaaatcttttatcacagaggggtgtaggcgtgagttttaggtgaatttatgtggttcctgcttgaaaaccttcccctctccaggttcggtttagagaactttgccacaggtcttctggggaccccagaggtgtctgtgctgacaaggcgacttcaaattccatactgagatcgttcccaggctggcgtctctggggtttttaaggctggctggagaagacagtgggagggtgccccgtctgacacccctggggttgctgagggaacggttggagtggggatcggcctgcgaaaggatactgtgaaatcactaattaactaataaacctgtctcaagttgaggatttgaagaaagaacacagagtccaccgtgcccaggacacaggtgttaaatggataggccgtctcaagcggaacacgtacccctggggcgctgtttacgccctccgaccccaaaagcaatcttgtttccttactcagtgtcctccattctagacagctacttaaaacctttgccgccctccgcccagtgcctcctttctcctctctggcaaaggaccctgcctcctccgccaggaaacaggtcagcagtggagccccccacacccgcacccgtactgtattgcggccgctctggaggatccacgcaacgtgg

SEQ ID NO: 2 - DNA, 2864 bp, Homo sapiens
  CDS (71)..(2830)
tttcgtggctgttgaggggcgtcttccaatctcgcacagctgcgttggctgtagaagagaacggacggcgatggcgacggtcgcagcaaatccagctgctgctgcggcggctgtggcggcggcagcggcggtgactgaggatagagagccacagcacgaggagctgccaggcctggacagccagtggcgccagatagaaaacggcgagagtgggcgagaacgtccactgcgggccggcgaaagctggttccttgtggagaagcactggtataagcagtgggaggcatacgtgcagggaggggaccaggactccagcaccttccctggctgcatcaacaatgccacactctttcaagatgagataaactggcgcctcaaggagggactggtggaaggcgaggattatgtgctgctcccagcagctgcttggcattacctggtcagctggtatggtctagagcatggccagccacccattgaacgcaaggtcatagagctgcccaacatccagaaggtcgaagtgtacccagtagaactgctgcttgtccggcacaatgatttgggcaaatctcacactgttcagttcagccataccgattctattggcctagtattgcgcacagctcgggagcggtttctggtggagccccaggaagacactcggctttgggccaagaactcagaaggctctttggataggttgtatgacacacacatcacggttctcgatgcggcccttgagactgggcagttgatcatcatggagacccgcaagaaagatggcacttggcccagcgcacagctgcatgtcatgaacaacaacatgtcggaagaggatgaggacttcaagggtcagccaggcatctgtggcctcaccaatctgggcaacacgtgcttcatgaactcggccctgcagtgcctcagcaatgtgccacagctcaccgagtacttcctcaacaactgctacctggaggagctcaacttccgcaacccactgggcatgaagggtgagatcgcagaggcctatgcagacctggtgaagcaggcgtggtctggccaccaccgctccattgtgccacatgtgttcaagaacaaggttggccattttgcatcccaatttctgggctaccagcagcatgactctcaggagctgctgtcattcctcctggacgggctgcatgaggaccttaatcgggtgaagaagaaggagtatgtggagctgtgcgatgctgctgggcgaccggatcaggaggtggcacaggaggcatggcaaaaccacaaacggcggaacgattctgtgatcgtggacactttccacggcctcttcaagtccacgctggtgtgccccgattgtggcaatgtatctgtgaccttcgaccccttctgctacctcagtgttccactgcctatcagccacaagagggtcttggaggtcttctttatccccatggatccgcgccgcaagccagagcagcaccggctcgtggtccccaagaaaggcaagatctcggatctatgtgtggctctgtccaaacacacgggcatctcgccagagaggatgatggtggctgatgtcttcagtcaccgcttctataagctctatcagctagaggagcctctgagcagcatcttggaccgtgatgatatcttcgtctatgaggtgtcaggtcgcattgaggccattgagggctcaagagaggacatcgtggttcctgtctacctgcgggagcgcacccctgcccgtgactacaacaactcctactacggcctgatgctttttggacaccccctcctggtatcagtgccccgggaccgcttcacctgggagggcctgtataacgtcctgatgtaccggctctcacgctacgtgaccaaacccaactcagatgatgaggacgatggggatgagaaagaagatgacgaggaggataaagatgacgtccctgggccctcaactgggggcagcctccgagaccctgagccagagcaggctgggcccagctctggagtcacgaacaggtgcccgttcctcctggacaattgccttggcacatctcagtggcccccaaggcgacgacgcaagcagctgttcaccctgcagacggtgaactccaatgggaccagcgaccgcacaacctcccctgaagaagtccatgcccagccgtacattgctatcgactgggagccagagatgaagaagcgttactatgacgaggtagaggctgagggctacgtgaagcatgactgcgtcgggtacgtgatgaagaaggctcccgtgcggctgcaggagtgcattgagctcttcaccactgtggagaccctggagaaggaaaacccctggtactgcccttcctgcaagcagcaccagctggcaaccaagaagctggacctgtggatgctgccggagattctcatcatccacctgaaacgcttttcctacaccaagttctcccgagagaagctggacaccctcgtggagtttcctatccgggacctggacttctctgagtttgtcatccagccacagaatgagtcgaatccggagctgtacaaatatgacctcatcgcggtttccaaccattatgggggcatgcgtgatggacactacacaacatttgcctgcaacaaggacagcggccagtggcactactttgatgacaacagcgtctcccctgtcaatgagaatcagatcgagtccaaggcagcctatgtcctcttctaccaacgccaggacgtggcgcgacgcctgctgtccccggccggctcatctggcgccccagcctcccctgcctgcagctccccacccagctctgagttcatggatgttaattgagagccctgggtcctgccacagaaaaaaaaaa

SEQ ID NO: 3 - DNA, 2601 bp, Homo sapiens
  CDS (5)..(2392)
gaagatggaaggcttaacgctgagcgatgcggagcagaaatactattcagatctcttctcctactgcgacattgagagcaccaagaaggtggtggtcaacgggcgggtgctggagctgttccgggccgcgcagctgccgaacgacgtggtcctacagatcatggagctttgtggtgcaacaagacttggttattttggaagaagtcagttctacattgctttgaaacttgtagctgttgcccagtctggtttccctttaagagtggaaagtataaatacagtaaaggaccttcctctgccaagatttgttgcttcaaagaatgaacaggaatctcgccatgcagcctcatattcttcagattctgaaaatcaagggtcgtattctggtgtaattcccccaccacctggcagggggcaagtgaaaaagggatccgtaagccatgatacggttcagcctcgtacatctgcagatgcacaggaacctgcatccccagtagtttcaccacagcaatccccaccaacttctccacacacatggaggaagcacagccgtcatcccagcggtgggaatagtgagaggcctctcgcgggacctgggccattttggtctccctttggtgaagcacaatcaggttcttctgctggtgatgcagtgtggtcagggcattccccacctccacctcaagaaaactgggtcagttttgcagatactccaccaaccagtactcttttaaccatgcatcctgcttctgtccaggaccagacaacagtacgaactgtagcatcagctacaactgccattgaaattcgtaggcaatccagtagttatgatgatccctggaaaataacagatgaacaaagacagtattatgtaaatcagtttaaaaccattcagcctgatctaaacggatttattccaggatctgcagctaaagagttttttacaaaatcaaaacttcctattcttgaactttctcatatttgggaactctcagactttgataaagatggtgcattgacactggatgagttttgtgctgcttttcatctggtggttgctaggaagaatggctatgatttaccagaaaaacttcctgaaagcttaatgcccaaactgattgatttggaagattcagcagatgttggggatcagccaggtgaggtaggttattcaggctctcctgctgaagctcctccaagcaagtcaccatcgatgccatcactaaaccagacatggcctgagctgaatcagagcagtgagcagtgggagacatttagtgaacgctcttcaagctcacaaactctgacccaatttgattctaacattgcaccagctgatcctgatactgctattgttcatccagttcccattcgtatgactccaagcaaaatccacatgcaggaaatggaacttaaaagaactggcagcgatcatacaaatcccactagcccattacttgtgaaaccatctgaccttttagaagaaaataagataaattcatcggtgaaattcgcttctggtaatactgtagcagatggttacagtagttcagactcttttacttctgacccagaacagatcgggagcaatgtaactcgtcaaaggtctcattcaggaacgtcgcctgataacactgcaccaccacctccccctccaaggccacagccctctcattctagatcatcatctttagatatgaatcggacctttacagtcaccacaggacaacaacaggctggagttgttgcccatcctcctgcagtgcctccaagaccacagccctcacaggctcctggtcctgctgtgcatcgcccagtggatgccgatggcctcataactcacactagtacctcacctcagcagataccagagcaaccaaattttgcagatttcagtcagtttgaagtatttgctgcatcaaatgtaaacgacgaacaagatgatgaagccgagaaacatccagaagtcctgccggctgaaaaagcttctgatcctgcaagttctcttcgagttgccaaaacagatagtaaaactgaagaaaagacagctgctagtgctcctgccaatgtgagcaaaggcacaacaccacttgctccaccacctaaacctgttcgaagaagattaaaatcagaagatgaattaaggccagaagttgatgaacatacacaaaagacgggtgtcttagctgctgttcttgcatcacaaccttctattcccagatctgttgggaaagataagaaagctattcaggcatcaattagacgtaataaggaaaccaacaccgttttggccagattgaatagcgaattgcagcaacaattaaaggatgttcttgaggagagaatttccctggaagttcaactggaacaacttcgaccattctctcacctataagccaattgccgttaactgtgaacatacttgtttttaagtggttttgggttcaaagccaatttggagacctagacattcagctcactgcttaactcaacattaaattttatgattctgttttgccctatatgttcaccgttgtatttaagtatcttttattttttaatttcgacaataaaaaggtcaggatggcgttaaaaaaaaaa

SEQ ID NO: 4 - DNA, 2520 bp, Homo sapiens
  CDS (5)..(2311)
gaagatggaaggcttaacgctgagcgatgcggagcagaaatactattcagatctcttctcctactgcgacattgagagcaccaagaaggtggtggtcaacgggcgggtgctggagctgttccgggccgcgcagctgccgaacgacgtggtcctacagatcatggagctttgtggtgcaacaagacttggttattttggaagaagtcagttctacattgctttgaaacttgtagctgttgcccagtctggtttccctttaagagtggaaagtataaatacagtaaaggaccttcctctgccaagatttgttgcttcaaagaatgaacaggaatctcgccatgcagcctcatattcttcagattctgaaaatcaagggtcgtattctggtgtaattcccccaccacctggcagggggcaagtgaaaaagggatccgtaagccatgatacggttcagcctcgtacatctgcagatgcacaggaacctgcatccccagtagtttcaccacagcaatccccaccaacttctccacacacatggaggaagcacagccgtcatcccagcggtgggaatagtgagaggcctctcgcgggacctgggccattttggtctccctttggtgaagcacaatcaggttcttctgctggtgatgcagtgtggtcagggcattccccacctccacctcaagaaaactgggtcagttttgcagatactccaccaaccagtactcttttaaccatgcatcctgcttctgtccaggaccagacaacagtacgaactgtagcatcagctacaactgccattgaaattcgtaggcaatccagtagttatgatgatccctggaaaataacagatgaacaaagacagtattatgtaaatcagtttaaaaccattcagcctgatctaaacggatttattccaggatctgcagctaaagagttttttacaaaatcaaaacttcctattcttgaactttctcatatttgggaactctcagactttgataaagatggtgcattgacactggatgagttttgtgctgcttttcatctggtggttgctaggaagaatggctatgatttaccagaaaaacttcctgaaagcttaatgcccaaactgattgatttggaagattcagcagatgttggggatcagccaggtgaggtaggttattcaggctctcctgctgaagctcctccaagcaagtcaccatcgatgccatcactaaaccagacatggcctgagctgaatcagagcagtgaggatactgctattgttcatccagttcccattcgtatgactccaagcaaaatccacatgcaggaaatggaacttaaaagaactggcagcgatcatacaaatcccactagcccattacttgtgaaaccatctgaccttttagaagaaaataagataaattcatcggtgaaattcgcttctggtaatactgtagcagatggttacagtagttcagactcttttacttctgacccagaacagatcgggagcaatgtaactcgtcaaaggtctcattcaggaacgtcgcctgataacactgcaccaccacctccccctccaaggccacagccctctcattctagatcatcatctttagatatgaatcggacctttacagtcaccacaggacaacaacaggctggagttgttgcccatcctcctgcagtgcctccaagaccacagccctcacaggctcctggtcctgctgtgcatcgcccagtggatgccgatggcctcataactcacactagtacctcacctcagcagataccagagcaaccaaattttgcagatttcagtcagtttgaagtatttgctgcatcaaatgtaaacgacgaacaagatgatgaagccgagaaacatccagaagtcctgccggctgaaaaagcttctgatcctgcaagttctcttcgagttgccaaaacagatagtaaaactgaagaaaagacagctgctagtgctcctgccaatgtgagcaaaggcacaacaccacttgctccaccacctaaacctgttcgaagaagattaaaatcagaagatgaattaaggccagaagttgatgaacatacacaaaagacgggtgtcttagctgctgttcttgcatcacaaccttctattcccagatctgttgggaaagataagaaagctattcaggcatcaattagacgtaataaggaaaccaacaccgttttggccagattgaatagcgaattgcagcaacaattaaaggatgttcttgaggagagaatttccctggaagttcaactggaacaacttcgaccattctctcacctataagccaattgccgttaactgtgaacatacttgtttttaagtggttttgggttcaaagccaatttggagacctagacattcagctcactgcttaactcaacattaaattttatgattctgttttgccctatatgttcaccgttgtatttaagtatcttttattttttaatttcgacaataaaaaggtcaggatggcgttaaaaaaaaaa

SEQ ID NO: 5 - DNA, 2432 bp, Homo sapiens
  CDS (373)..(1653)
ggttatacaaactcttaacaaagtgtgcctcagattttcttcttctcttttctctctgaactgaaaagggatactgggtttcctcctagcttttttttttaaacccgtcctagccagggcccacacattttaacaccctgcctgaatgggggctctttctctctgcaggttcagtgaacagcattttggacaggacatttggtgccaggtctgagtagccagtttgctgaattattgtcccagtcagccaggattgtgagctgtttgggaagtttcgtggaaacgcccaagtgccagcacaggtggagggacacctggagaccagtttcaggaacttttgccacaagtataaaagacttcagaagtgcaaagatgctgaaacagatactgtcggagatgtacatagatcctgatctactggcagagctcagcgaagaacagaaacagatcctgttcttcaagatgagagaggaacagatccgacgatggaaagaaagagaagcagctatggaaagaaaggagtccctgccagtgaaacccagaccaaagaaagagaatggcaaatcggttcattggaagcttggagctgataaggaagtctgggtatgggtgatgggcgaacaccatctagataaaccctatgatgtgctctgtaatgaaattattgctgagagggcccggctgaaagcagaacaggaggcagaagagcccagaaaaactcactctgaagaattcaccaatagcttgaaaacaaaatcacagtaccatgatctgcaggctccggataaccagcagactaaagacatctggaagaaagtggcagaaaaggaggaactggagcaaggatctaggccagcaccaaccctggaagaagagaaaatccgaaagaaagaatctatgaagaaaaaacaagatgaagaaataaatcaaatagaagaagagagaacgaagcagatttgtaagagctggaaagaagactcggaatggcaggcatctctgcgaaaatccaaagcagctgatgagaagagacgctccttggctaaacaagcacgagaagactacaagaggttatccctcggggcccagaaaggaagaggcggtgagaggctgcaaagccccttgcgtgttccgcagaaaccagaaagacctccccttccacccaagcctcagttcctaaactcaggggcatatcctcaaaaacctcttagaaatcagggagtggtgaggacactgtccagctctgcccaagaggacatcatccggtggtttaaagaggagcagctaccacttcgagcgggctaccagaaaacctcagacaccatagccccctggttccatggaattctcacactcaagaaagcaaatgaacttcttctgagcacaggcatgcccggcagttttctcatccgagtcagtgaaaggatcaaaggctatgccctgtcctatctgtcggaggacggctgtaaacatttcctcatcgatgcctctgcagacgcctacagcttcctgggcgtggaccagctacagcatgccaccttggcggatttggtggaatatcacaaggaggaacccatcacttccctggggaaggagctccttctctatccctgtggtcagcaggaccagctgcctgactacctggagctgtttgagtgacagcctccatcagggtcatcctacagcctccaagcgggctttcccctggacaaatgccactgcaacatttatgtgtgaagccaaaatcaccctgcagcagagccaatactgatcaactgaaagtaaagtatccatggagtcctcattgacacctcttttctgcacaaatactggaattcaatgtcaagagaaaatgacctctgctcaaaagggagaagagtctcaatttcagcaagtacctgtcatgaagggtatgaccttaatgatgtacataaaataaaacaaatgaagaaatggaaaacttttagaaattaaggtgtacttgaaaacgaatatctatcatatgacccctgcactccctctgtatcatctcaggaggtttcaggggcctgttgacatgaagtttcgaagtttcatgttggctttggaatggtagcaaaagcctttcctggctgagatgatgcttaaaacacacctcacttattgtacatgttggaaccaggacatgagagacatagaaaaacagaagtcatgaatgtaaattgaatgagaggcttaacatgcatgaaaatacagatggacctgcaggaaagtgagcaaacatcgctgagtttgttttcttgttcgggagaatggggccggggctggcctggcctcccctggatatactctatagtgcaccaaaaggataaagcatctgtacatgtatttttttattttttatcagaagtgcttagacaagaacagaataagcaggctgtttggatgctacttgt

SEQ ID NO: 6 - DNA, 2513 bp, Homo sapiens
  CDS (373)..(1734)
ggttatacaaactcttaacaaagtgtgcctcagattttcttcttctcttttctctctgaactgaaaagggatactgggtttcctcctagcttttttttttaaacccgtcctagccagggcccacacattttaacaccctgcctgaatgggggctctttctctctgcaggttcagtgaacagcattttggacaggacatttggtgccaggtctgagtagccagtttgctgaattattgtcccagtcagccaggattgtgagctgtttgggaagtttcgtggaaacgcccaagtgccagcacaggtggagggacacctggagaccagtttcaggaacttttgccacaagtataaaagacttcagaagtgcaaagatgctgaaacagatactgtcggagatgtacatagatcctgatctactggcagagctcagcgaagaacagaaacagatcctgttcttcaagatgagagaggaacagatccgacgatggaaagaaagagaagcagctatggaaagaaaggagtccctgccagtgaaacccagaccaaagaaagagaatggcaaatcggttcattggaagcttggagctgataaggaagtctgggtatgggtgatgggcgaacaccatctagataaaccctatgatgtgctctgtaatgaaattattgctgagagggcccggctgaaagcagaacaggaggcagaagagcccagaaaaactcactctgaagaattcaccaatagcttgaaaacaaaatcacagtaccatgatctgcaggctccggataaccagcagactaaagacatctggaagaaagtggcagaaaaggaggaactggagcaaggatctaggccagcaccaaccctggaagaagagaaaatccgatcactctccagttcttcaagaaatattcaacaaatgttggcagattcaatcaatcgtatgaaggcatatgcatttcaccagaagaaagaatctatgaagaaaaaacaagatgaagaaataaatcaaatagaagaagagagaacgaagcagatttgtaagagctggaaagaagactcggaatggcaggcatctctgcgaaaatccaaagcagctgatgagaagagacgctccttggctaaacaagcacgagaagactacaagaggttatccctcggggcccagaaaggaagaggcggtgagaggctgcaaagccccttgcgtgttccgcagaaaccagaaagacctccccttccacccaagcctcagttcctaaactcaggggcatatcctcaaaaacctcttagaaatcagggagtggtgaggacactgtccagctctgcccaagaggacatcatccggtggtttaaagaggagcagctaccacttcgagcgggctaccagaaaacctcagacaccatagccccctggttccatggaattctcacactcaagaaagcaaatgaacttcttctgagcacaggcatgcccggcagttttctcatccgagtcagtgaaaggatcaaaggctatgccctgtcctatctgtcggaggacggctgtaaacatttcctcatcgatgcctctgcagacgcctacagcttcctgggcgtggaccagctacagcatgccaccttggcggatttggtggaatatcacaaggaggaacccatcacttccctggggaaggagctccttctctatccctgtggtcagcaggaccagctgcctgactacctggagctgtttgagtgacagcctccatcagggtcatcctacagcctccaagcgggctttcccctggacaaatgccactgcaacatttatgtgtgaagccaaaatcaccctgcagcagagccaatactgatcaactgaaagtaaagtatccatggagtcctcattgacacctcttttctgcacaaatactggaattcaatgtcaagagaaaatgacctctgctcaaaagggagaagagtctcaatttcagcaagtacctgtcatgaagggtatgaccttaatgatgtacataaaataaaacaaatgaagaaatggaaaacttttagaaattaaggtgtacttgaaaacgaatatctatcatatgacccctgcactccctctgtatcatctcaggaggtttcaggggcctgttgacatgaagtttcgaagtttcatgttggctttggaatggtagcaaaagcctttcctggctgagatgatgcttaaaacacacctcacttattgtacatgttggaaccaggacatgagagacatagaaaaacagaagtcatgaatgtaaattgaatgagaggcttaacatgcatgaaaatacagatggacctgcaggaaagtgagcaaacatcgctgagtttgttttcttgttcgggagaatggggccggggctggcctggcctcccctggatatactctatagtgcaccaaaaggataaagcatctgtacatgtatttttttattttttatcagaagtgcttagacaagaacagaataagcaggctgtttggatgctacttgt

SEQ ID NO: 7 - DNA, 1838 bp, Homo sapiens
  CDS (227)..(1519)
agcctggagcctgcccagcggccaccactcatccacatcatggcacagcccctctgcatccgtgccctcctcaacctccacaccgacgtgggcagtgtccgcatgcggaggcctgtgcagggacagcgagcggtcctgggcggcagggtgtgggcacccagtgggagcacaggaggtctgaggcagagggaaacctggggcaagtcctcccttcctgcatgtaggaatgtcaggagggtctttgtccttatgcccccatctgtcctgcagggcagagaagtccgtggcccccagcaacacagggagcaggaccaccagtgtccgctgcagaggtatcccccggggacctgtgaggccagccatcccaccaccactgtcgtcagtgtatgcctggggtggtgggctgggcacccccctgcggctgccaatgctcaacacagaggtggtccaggtggcagctgggcgcacgcaaaaagccggcgtcacgcgctctgggcgtctcatcctgtgggaggccccacccctaggtgcaggcggaggcagtctccttcctggggcagtggagcagccacagccccagttcatctcgcgtttcctggagggccagtcgggtgtgaccatcaagcacgtggcctgtggggacttcttcactgcctgcctgactgacagaggcatcatcatgacattcggcagcggcagcaatgggtgcctaggccatggcagcctcactgacatcagccagcccaccattgtggaggctttgctgggctatgaaatggtgcaggtggcctgtggggcctctcacgtgctggccctgtccactgagcgagaactatttgcctggggccgtggagacagcggcagactggggctaggcaccagggagtcccacagctgcccccagcaggtgcccatgcccccaggacaggaagctcagcgagttgtatgtggtatcgattcctccatgatcctcactgtgcctggccaagccctagcctgtgggagcaacaggttcaacaagctgggcctggaccacctctccctgggggaggagcctgtcccccaccagcaagtggaggaggccctgagcttcacactactaggctctgcacccctggaccaggagcctctgctgagtatagacctgggcactgctcactcagctgctgtgactgcctcgggtgattgctacacttttggcagcaatcagcacggacagttgggcaccaatactcgccgaggcagtcgggcaccctgtaaggtccaaggccttgagggcatcaagatggcaatggtagcctgtggggatgccttcactgtagctattggggcagagagcgaagtgtactcttggggcaaaggggcgcgaggtcgattgggaaggagggatgaggatgccggactccctcggccagtgcagttggatgagacacacccttacacggtgacttccgtgtcctgttgccatggaaacaccctcctggctgttcgatcggtcacagatgagccggtccccccctgaggcacccggattcacctctggaccaccctgatattgcttctcctctgaatgctctgaaaagtgcaggtgcccaaggcatgacttgcagctgtctcctggattgtgtcatcatggggtatcagggctggcaaaacccctgctctgcttttggccttggatatggaaacctcaaccactttgttctcctaccacctctttgcccttcctaccccttcctcccttcagtcagtgtccccagggtccagcctggctagagttagaaggcagacctagcctttggaagcagggtggcctccagagccttgccataaaaagg

SEQ ID NO: 8 - DNA, 998 bp, Homo sapiens
  CDS (87)..(248)
gcgcgcttttgaatacctgcgttctgtagcgctagttctcttcaagatttgcttagtgtcatttcatttcggtttcttttctcgccatgtttttctgtcggaattacggttcgttttggttctatgtactctctaaaatgttatcgtttttcatttgtctactaattttcgtgcatttgttactactgagtttcttaatatctgactggcctccgcccacgggctctgcagagcataaatactcaggctgatggtagtgcagagactctccctccttgatcagcgcaaacgttggtctgaggcttgagggatggagcaacattttcttggctgtgtgaagcgggcttgggattccgcagaggtggcgccagagccccagcctccacctattgtgagttcagaagatcgtgggccgtggcctcttcctttgtatccagtactaggagagtactcactggacagctgtgatttgggactgctttccagcccttgctggcggctgcccggagtctactggcaaaacggactctctcctggagtccagagcaccttggaaccaagtacagcgaagcccactgagttcagttggccggggacacagaagcagcaagaggcacccgtagaagaggtggggcaggcagaggaacccgacagactcaggctccggcagcttccctggagcagtcctctccatccctgggacagacagcaggacaccgaggtctgtgacagcgggtgccttttggaacgccgccatcctcctgccctccagccgtggcgccacctcccgggtttctcagactgcctggagtggattcttcgcgttggttttgccgcgttctctgtactctgggcgtgctgttcacggatctgtggagctaagcagccttagatagcagcagaaggctttttggattctcctccttgaaaagattctcagttaccaaacgtctccacctagaaaataaaaatacattaagatgtgcaaaaaaaaaaaa

SEQ ID NO: 9 - DNA, 1198 bp, Homo sapiens
  CDS (430)..(1107)
ccgtatgaagttctggtgcccccttttccttctgccatgattctaacgtgcgtccagagagctgtgagtgtgctctactaccgttgggaaaaccgaaattgcggaggcctgaggcttttcaaaattgaacgggaagcgtttttaaactgccgcagggagaggcgtttgcgagatccgcgctcgctgcaacacctactcctccctcggctctgggagtcgccaggccagaggcgccgcggacctggtgcgcagcgcactgcgcggctggcgaacgggcaggccgggcatcagcgcaggcgcgcgcggctggggctcggctccgggggtggcggtcggacagtgtctagcacgctcagtccgggcttggggccccgcggcggagaaggaggtagagggggcggcggcggcggcggcggtggtggcggcaccatgtttcttcactcagttaatctctggaacctggcgttttatgtcttcatggtctttctggcaaccctggggctgtgggatgtcttcttcggcttcgaggagaataagtgcagtatgagctacatgtttgagtacccggagtatcagaaaatagaacttccaaagaaactggcaaaacgctatcccgcatatgagttgtatctttatggagagggatcctatgctgaagaacacaaaattctccctttgacgggtattccagttctctttcttcctggtaatgctggaagttataagcaagttcgttctattggctccattgcacttagaaaagcagaggacattgacttcaagtaccactttgacttctttagtgtgaacttcaatgaagaactggtggctttgtatggtggaagtcttcagaagcagaccaagtttgtacatgaatgtattaaaacaattctcaaactctataagggtcaagaatttgctccaaaaagtgtggcaataattggtcattctatgggtggccttgttgcaagagcattgcttacactgaaaaattttaagcatgatctgataaatcttcttattacacaagccacacctcatgttgctcctgtgatgccattagatcgtttcattacagggtcaactggatggctgaaggaccatgggtaggagagaaccttttcaatgtatatccttttgaatcttgaattcaaaaacatattaaaaatacattttaaagcatgtcatgtgtaagtta

SEQ ID NO: 10 - DNA, 933 bp, Homo sapiens
  CDS (165)..(674)
ggaaatttaaactgaagccgcggccgaaaacgccaagagattgatgctgtagctgccctgagataaccaggactgtggaatcgggaagagctcatggagctcgcgaatgtaatacggaggcctctgaggaaggagtacggaggccgagaaggagccggcatttgatgagcgaaccgggaaagggagacgattgcctcgagctggagagttccatggctgagagtaggctccgggccccggacctaggagtttccaggtgtctaggaaaatgccagaagaactcaccaggtgccaggaagcatcccttttccggaaagtccttttacttggatctgcctgctggcaagaatctccagtttttgacgggggccattcagcaactgggtggggtaattgagggttttctgagcaaagaagtaagttacatcgtgtccagccgcagagaagtaaaggcagagagcagtgggaaaagccatagaggctgccctagccctagccccagtgaggtcagagtggaaacatcggccatggttgatccaaaaggcagccaccccaggccttcacggaaacccgttgactcggtgcctctaagcagagggaaggagctgctgcagaaggctatcagaaaccaggtgagctggggcaagatgggacagagccggtggtctccagcatagggagggatttcactcttcttcccaggttcttctgaagcacccacacaaaatgcacactctgcgatatgtagtattgtcattatttccttcttctacatcaggtagtggaggctcagacaagttatttagccattcacctagagagtaagtgttgaagccagagccacctccaactctggagcctaccaagagaactgtggggatgtgggatgtggcgggacagggttgctgggtacagaagccagacttcttttac

SEQ ID NO: 11 - DNA, 811 bp, Homo sapiens
  CDS (385)..(633)
ctttgcttcccttctctctctcaaaatatcttaatattcttttactgcagttgacacaagtaactgaaacgaggaaagctaaacgacgattaaggagggagtgctggactcacaaatccctagagacagggcccatgccacaggggacacatggggaagcgccagggtcagtgaaggggagagggatgtggggaaacactgccaagagcctccatggtgttttccacaggaaggaaggtgcagcaggatgagcaggattaggataagtagctagtctgaatcattacagacggcgctaggaggtaggggctgtccctaattgtcttgtacctagccctagggtgaccagggcaggggaatcatggcgagaagcgtaagggcctgatgaagaaggtgtgctgggtgtgggctctagcccacttggttttgtgtgagaggtggctgacagcaggttgtttgctgtatgtaggagttatccagccctgcaagggcagtccctccagtgtctgcaaagcccgaagatgtctgcatccaaaatacagaataaaaagatatggttactacaagtactcagtaagactgataatctgtcatcatcatcctcatgcccttaaagcagagctaactgatgattaatatatgcttctatgttaacagtcttggactttattaatggtgggtggaagttaacttaatgtgtgtatgcaaactaaaaagtggcatccttttcattaatgacccaaccattattcaagagctatgtctagttagggacttcagacttttgaaagaaatgaagaaataatgccag

SEQ ID NO: 12 - DNA, 1478 bp, Homo sapiens
  CDS (54)..(266)
gcacgaggggcttgcgacggaagtggcctctctgcttctgcaggctggggaagatgctgcgtccattaccgtggctgtaccttggcctctgcagcctcctggtgggggaggcagaggccccgagccccgtggatccgctggagcgaagccggccgtacgcggtgctgcgagggcagaacctggtgttgatgggaaccattttcagcatcctgctggtgactgtcatccttatggcattttgtgtctacaagcccattcggcgtcggtgacagccagacaagttcttcaatgagtatttgggaataggataagttgtgttgcacacaggccagtggagaagttggaaccaaaactttcctacttggaaatgacctttggtctggacagttggtaaatgctaaatgaattagaagaaaacatgtactagacattattttttcctaacactgtagcgcaaataattggcccctgagtccgcttctcagtgtttctgactgtacttgttaaaagtaagacctgaaagctccaaaggtcagtgtaaagatggagtgttcatgagaaagaaaacatggtaaccttgtgagtgcctgtaagaaccacactgtaaagaactcatcattaatgcttgaaaatgttattaagaaggagacttaccatgcagacattccctatttaagaaccatttggttacagtgggttaagaatcacagattttttttttttaatctcacctgagttagcctagaatgcgctggttgcaaagtggtgtcagctgtggggatcttgggccctcgttcctcacctgcatcctgccctgcactcaggtgctccccctgaagtcagggtcacatcaggtagacctgttactatatgcacctttggcctggaatgctctgaagttggactggaaatgttactaggttggcctgttacaaaaaggaccccatcctgcttaaacacattgatctcccttgccctgcatttgagtctttctagcccacggtctgaaacttgaggcagctttccagatttggaatgtaaaaggctcagtgggcactctgttcatccctgggtggggagggcccagccaacagaagtgcatgtccactgtgcgggccagtgtgtgtttacacaaatttcatctcagctttgaaaatgctgctattagtttccactgttggtgaactggattttttcctcctattgaaatgatactttcatacttataaagctgtcgtcaatatttatttcaaggtgctagatttaattttgttattaaattgaaatgcttatcttgtgttcaagcacagcactgattttaacaacctgcatttaatgtgaagtaaccgaagtaggatactgtaactgtgtaaggattttgtttgtaatcttgtaacattgaaccattgaaatgttcagttctttgcttttgagcaaaacgtcaattaaaactaaagtaaaatcctaaaaaaaaaaaa

SEQ ID NO: 13 - DNA, 563 bp, Homo sapiens
  CDS (60)..(398)
gcggtacggcgtgttggtcccagcggttcagctgaggtagggacgtgccgtaggccggaatgttaccggctgttggatctgtggatgaggaagaggatcctgcggaggaggattgtcctgaattggttcccattgagacgacgcaaagcgaggaggaggaaaagtctggcctcggcgccaagatcccagtcacaattatcaccgggtatttaggtgctgggaagacaacacttctgaactatattttgacagagcaacatagtaaaagagtagcggtcattttaaatgaatctggggaaggaagtgcgctggagaaatccttagctgtcagccaaggtggagagctctatgaagagtggctggaacttagaaacggttgcctctgctgttcagtgaagtgaggaatgtgtttactgtgtacatggtttactagaaatgtttattgattatatttccagctttaattttcttgagtaatttaactgaatttacacagtttgcttcattgtattttcaaacaaatagaaaataaacttattaggaagcaaaaaaaaaaaaaaaaa

SEQ ID NO: 14 - DNA, 633 bp, Homo sapiens
  CDS (118)..(483)
  misc_feature (1)...(633): n = a,t,c or g
gttcctctgggtgcttccgcctccccttctgctgcttctccagcctcttcggcctcctcgcccgccgcgggaacccgagaccccagtgtatgccccacccctgaccccgctcgcgacatgtccaccccggctcggcggcgcttcatgcgggacttcaagaggttgcaggaggatcctccagccggagtcagcggggctccgtccgagaacaacataatggtgtggaacgcggtcattttcgggcctgaagggaccccgtttgaggatgtctatgcagatggtagtatatgtctggacatacttcagaaccgttggagtccaacctatgatgtgtcttccattctaacatccatacagtctctgttggatgaacccaatcccaatagtccagcaaacagccaggctgctcagctgtaccaggagaacaaacgggaatatgaaaagcgtgtttctgcaatagtagaacaaagctggcgtgattgttgaccccgggtacagtttaaagaagctggccataagaaaaatatatattgatgtgtttgtcacctccctactcctgtcattacatttactttattaaaagcaaaataactgttggtgctgtttccatctttccnttgccaagttttccta

SEQ ID NO: 15 - DNA, 944 bp, Homo sapiens
  CDS (384)..(794)
  misc_feature (1)...(944): n = a,t,c or g
tgttatatgaaaccattggttttgaacaggactctggctactatgtggaaaagagtggaagcaacgagagcaagagactattgtgccaatccagaaaaaggaatggaggtggtaagaagcagtcagatcctgcatacattttcacgaaagcacctgcaggatttcctgatggactggacagatgtaaggttggttcagcccccgtctacactggggtggtgcttagccggcgccagaccgaccctcgacttcggagaggcagcgcggttcctctgggtgcttccgcctccccttctcctgcttctccagcctcttcggcctcctcgcccgccgcgggaacccgagaccccagtgtatgccccacccctgaccccgctcgcgacatgtccaccccggctcggcggcgcctcatgcgggacttcaagaggttgcaggaggatcctccagccggagtcagcggggctccgtccgagaacaacataatggtgtggaacgcggtcattttcgggcctgaagggaccccgtttgaggatggaacatttaaacttacaatagaattcactgaagaatatccaaatgtctatgcagatggtagtatatgtctggacatacttcagaaccgttggagtccaacctatgatgtgtcttccattctaacatccatacagtctctgttggatgaacccaatcccaatagtccagcaaacagccaggctgctcagctgtaccaggagaacaaacgggaatatgaaaagcgtgtttctgcaatagtagaacaaagctggcgtgattgttgaccccgggtacagtttaaagaagctggccataagaaaaatatatattgatgtgtttgtcacctccctactcctgtcattacatttactttattaaaagcaaaataactgttggtgctgtttccatctttccnttgccaagttttccta

SEQ ID NO: 16 - DNA, 1184 bp, Homo sapiens
  CDS (23)..(235)
tgagctgcatcgcgggaggcgcatggcggggatggcgctggcgcgggcctggaagcagatgtcctggttctactaccagtacctgctggtcacggcgctctacatgctggagccctgggagcggacggtgttcaattccatgctggtttccattgtggggatggcactatacacaggatacgtcttcatgccccagcacatcatggcgatattgcactactttgaaatcgtacaatgaccaagatgcgaccaggatcagaggttccttggggaagacccaccctacgaagttggaatgagaccatcagatgtgataagaaactcttctagatgtcaacataaccaaccttataaagactaaaattcatgagtagaacaggaaaatcatcctgactcatgtgttgtgttctttatttttaattttcaaagaggctcttgtatagcagtttttgtctattttaacattgtagtcatttgtactttgatatcagtattttcttaacctttgtgactgtttcaatattacccccgtgaaagcttttcttaatgtaactttgagtacattttaattgccttctatttttaaaactcaaaatcattagttgggctttactgttcttgctattgtatggcatatacatctgcctggatatatttctactcttgaccaaagttttgtaaagaacaatataagatttcgggtaggggtatggggagggaagatattttattgagaactacttaacaaaagatttatctgtaagcttgaactcaggagtacagttttagctatctagactctaacagcttttgctttaaaattattaaagtgtttcttaatgaaaaagaaaagatcttgctaaagttaaaataaggaacatttcaccttttaaatatttaattcttatgtggacttatttccagaaaactttggtgataattcttgagacaaaaggtggttaagtagcattattatgtaatgcttatataccatagagtttttaatagaagagaaatccatttcctccgagggtcactattaacaatgtacttccttaaatttagtttaatgattgtaatgggtgctgcatttgcacattgcattaagttatgatgagacgaattgttgttaaaaattatagcaaaaagaaatgtaaacttggttaaaatccttaaaaaaaaaa

SEQ ID NO: 17 - DNA, 1973 bp, Homo sapiens
  CDS (148)..(1839)
ggcagccctagaaggagagagagaaaggagccggcagcgctcttacgcgtcccggggctgccgccactctctcggccggtaacgcggtgctttgcggctgtcgtcaagcgcggcgttgggccggcgggagggggctgaggggctgccatggcggcggcgggccggctcccgagctcctgggccctcttctcgccgctcctcgcagggcttgcactactgggagtcgggccggtcccagcgcgggcgctgcacaacgtcacggccgagctctttggggccgaggcctggggcacccttgcggctttcggggacctcaactccgacaagcagacggatctcttcgtgctgcgggaaagaaatgacttaatcgtctttttggcagaccagaatgcaccctattttaaacccaaagtaaaggtatctttcaagaatcacagtgcattgataacaagtgtagtccctggggattatgatggagattctcaaatggatgtccttctgacatatcttcccaaaaattatgccaagagtgaattaggagctgttatcttctggggacaaaatcaaacattagatcctaacaatatgaccatactcaataggacttttcaagatgagccactaattatggatttcaatggtgatctaattcctgatatttttggtatcacaaatgaatccaaccagccacagatactattaggagggaatttatcatggcatccagcattgaccactacaagtaaaatgcgaattccacattctcatgcatttattgatctgactgaagattttacagcagatttattcctgacgacattgaatgccaccactagtaccttccagtttgaaatatgggaaaatttggatggaaacttctctgtcagtactatattggaaaaacctcaaaatatgatggtggttggacagtcagcatttgcagactttgatggagatggacacatggatcatttactgccaggctgtgaagataaaaattgccaaaagagtaccatctacttagtgagatctgggatgaagcagtgggttccagtcctacaagatttcagcaataagggcacactctggggctttgtgccatttgtggatgaacagcaaccaactgaaataccaattccaattacccttcatattggagactacaatatggatggctatccagacgctctggtcatactaaagaacacatctggaagcaaccagcaggcctttttactggagaacgtcccttgtaataatgcaagctgtgaagaggcgcgtcgaatgtttaaagtctactgggagctgacagacctaaatcaaattaaggatgccatggttgccaccttctttgacatttacgaagatggaatcttggacattgtagtgctaagtaaaggatatacaaagaatgattttgccattcatacactaaaaaataactttgaagcagatgcttattttgttaaagttattgttcttagtggtctgtgttctaatgactgtcctcgtaagataacaccctttggagtgaatcaacctggaccttatatcatgtatacaactgtagatgcaaatgggtatctgaaaaatggatcagctggccaactcagccaatccgcacatttagctctccaactaccatacaacgtgcttggtttaggtcggagcgcaaattttcttgaccatgtctacgttggtattccgcgtgcatctggatacaaatctatactaaatcctgagtggactgtacttgttcgagagtcccaggtaattgtcattccataccctgacaatgtccctcgaagctggagtgcgcacactgtatcgtacaccaagtaatagtgcgctgattactgctatagctctgatcgacgtctgtggtggcatcttggcaatacctggcattgtacattggcaggacaagaacgcagatgatagacgacgactgcgagactccgaccgatttgatt

SEQ ID NO: 18 - DNA, 2356 bp, Homo sapiens
  CDS (1)..(1641)
atgactagtgccgcccctgctaagaaaccctaccgtaaggcaccaccagagcatcgggagctgcgtttggaaattcctggatcccggcttgagcaggaggaacccctgactgatgcagaaaggatgaagctcttacaggaggagaatgaagagcttcgccggcgcctggcctccgccaccagacgcactgaggccctggaacgtgagctggaaattgggcaggactgcctggagctggagctgggccagagccgcgaggagctggacaaatttaaggataagttccgcaggctgcagaacagctacacggcttcccagcggaccaaccaggagttggaggacaagctgcacacactgatcaagaaggctgagatggataggaagacgctggactgggagattgtggagctgaccaacaagctgctggatgccaagaacaccatcaacaagctggaagagctcaatgagcggtaccggctggactgcaacctggctgtacagctcctcaagtgcaacaagtcccacttccgaaaccacaagtttgccgatctgccctgtgagctacaggacatggttcggaaacatttgcacagtggtcaagaggccgccagcccaggtcctgctcccagcctagccccaggggctgtggtgcctacctcagtcattgcccgagtgttagagaagccggagtctctactgctcaattcagcccagtcaggcagcgccgggcgccccttggctgaggatgtctttgtgcatgtggacatgagtgagggtgtcccaggtgatccagccagtcccccggcccctggcagccccaccccacaacccaatggggagtgccactctctgggtactgccaggggctccccggaggaagagctgcccctgccagcctttgagaagctgaacccctacccaaccccgtctccaccacacccactgtatcctggccgcagggtaatagagttctctgaggataaggttcggatcccccgcaacagccccctgcccaactgcacttacgctacccgccaggccatttccctgagcctggtagaggaggggagtgagcgggcccgccccagcccagtgcccagcacccctgcctcagcccaggcctcaccccaccaccagcccagcccagcacccctaacactcagtgccccagctagctctgccagctctgaagaggacctgctggtcagctggcagcgggcatttgtggaccgtactccaccacctgctgctgtggcccagcgcacagcctttggacgcgatgccctccctgagctgcagcgccattttgcccatagccccgctgacagagatgaggtggtccaggcaccttctgcccgacccgaagagagtgagcttttgctacccacagaacctgactctggctttcccagggaggaagaagagctgaacctgcctatcagtcctgaggaagagcgccagagcctgctgcccattaacaggggcacagaggaggggccaggcacttcccacaccgagggcagggcctggccactccccagctccagtcgcccccagcgcagccccaagaggatgggggttcaccacctgcaccgcaaggacagcctgacccaggcccaggagcagggcaacctgctcaactagggcccctgctggccttcctgccattgctgcaccaggactgcaaggagtccccacaccttggcagctcagggtccccagtccaagcccttgacctctcctctatccagacccgcacagctgtttcctgtgtggatggggtcaggttgtgggccatgccaggcctgtcagctgcgttgactgactgcagcagcttgcctcatggttttccctttttcttagaatatttattcttcagaggtaacatgcagttgggtctcaagacctttcctccaatcagcccaacccagcccagactgggcttttctggggagctgaggagtttatcagtattcatcttccatcctttcatagtcacaagttttgttattttgtttttttttgggggtgatggtgtaattgttaacctcatttccgtttcctacctgtttgcttccccccccagtcctccgcatgagctgttgccctccaggggcctggcacagctggccttggggacgagggagaggactgattcagggccccctcagctgtctcctccctccctctggaaaggagggtggggctcaggggcctcaagctgggctctgtgtgaggcctggcccccactcccaaccttggctctagactgttactcttaagctttgagaaattttcacattgatgactattttaaaatcaaataaaactattttactggtaaaaaaaaaaaaaa

SEQ ID NO: 19 - DNA, 703 bp, Homo sapiens
  CDS (2)..(430)
gatgaggagggctctgatccccccctgccggggagggcccagcgcatccgacaggtgctgcagctgctctcctagtgggttcagcgcggggcggggccgctgcccagtgcagggctgcctcagaccacacagggtgcagctcctccggcggtgggggccgggttcaccagcagggcagcggctgagcaagggctttcagctcctccggtggtgggggccgggatcaccagcaccagagcctcgcaagggccccttccctcctccagaccctccttggccggtgacggctgtgacagtgatggcaggttcagtgccttcagcgcagagcgtggatgctctggaatcacccggacccctggccttggagggaccctccagccccaggaatctgctttggagggaaatgtctatttttctaccgggaatattttagagattggggcatgctggctcctcccgccagctgcaaacctgcaccttccgcctgattcccgatccccctgcgtgggccgcattcctggtcccctgcctgcgtccatcgaggggcctggctgtggcctgttttcctttgaccccacacagcgtcattgcgggtcatggggagcccctggtgggagcttgtggagtcggatcacgtacctgtgcagaaaccgcctctgtggctgcatttgaaataaaacccgacccagcagcaaaaaaaaaa

SEQ ID NO: 20 - DNA, 3671 bp, Homo sapiens
  CDS (135)..(3557)
aaaagttgttttgtaggatacaggagagttctcaggtactttataaattggagcagagtaaatccaaacgtgaaccagagaatgagttaaccaaacagcacccttctgtttctttacagcagtataagaatttcatgtcatccatttgcaacagtctttttgaagcattgtttcctggatcttcctactcgactagattttcagctttaaccattttaggttcaatagctgaagtttttcatgtcccagaaggcagaatttatacagtatatcagctgagtcatgatattgatgttggtcgtttccaaacactaatggaatgttttaccagcacttttgaagacgtgaaaattttagcatttgatcttctgatgaagttatcaaaaacagctgtacactttcaggattcggggaaactgcaaggcttatttcaggcagcattggagctcagcacaagcaccaaaccatacgactgtgtgacagcttcctacctgctgaacttcttaatctggcaggatgctctaccgtcatccttgtctgcctacttaactcagcaagttgcatgtgataatggagataggcctgctgctgtggtggaaaggaacacattaatggttatcaaatgcttgatggaaaatcttgaggaagaagtatctcaggctgaaaattctctgcttcaggcagcagcagcatttccaatgtatgggcgagtccactgtataacaggagctttgcagaagttatctctaaacagcctgcagttggtgagcgagtggagacctgtggtagagaagctccttttgatgtcctacaggctttccactgtggtgtctccagtcattcagagctcatcccctgaaggcctcatcccaatggacactgattcagagtcagcaagccgcttacagatgattctgaatgagattcagcctcgagatactaatgattattttaaccaagccaaaatattgaaagaacatgatagctttgatatgaaggacttgaatgctagtgtggtgaatattgatacttctacagaaatcaaaggtaaagaagtaaaaacatgtgatgtaactgcgcagatggtgctggtatgttgttggagaagtatgaaggaagttgctttacttttaggcatgttgtgccagcttctgcccatgcagcctgtgccagaatcttctgatggattattgacggtggagcaggtaaaagaaataggagattactttaaacaacaccttttgcagtccaggcacagaggagcatttgaattggcttatactggttttgtgaaactcactgaagtactaaacaggtgcccaaatgtgagtctgcaaaagctgccagaacagtggctatggagtgttttagaggaaattaaatgcagtgatccttcatctaaactctgtgctacaaggcgcagtgctggaattcctttctacatacaggcactgttggcatctgaaccaaagaaaggcagaatggatttgttgaaaataacaatgaaagagttaatctctttggctgggcctacagatgacatacagagtacagtcccccaggttcatgctttaaatatccttagagcattgttcagagatacgcgcctgggagaaaatattattccttatgttgctgatggagctaaggctgcaattctgggttttacatcaccggtctgggcagtgcgaaattcatccacacttctctttagtgccttgatcacaagaatttttggagttaaaagggcaaaggatgaacattccaaaacaaataggtgtggtcactcacctgtctaccactcccgtgaaatggcagctcgtgccttggtcccatttgttatgatagatcacattcctaataccattcgaactctgttgtccacactccccagctgcactgaccagtgtttccggcaaaaccacattcatgggacacttctccaggtttttcatttgttgcaagcctactcagactccaaacacggaacgaattcagacttccagcacgagctgactgacatcactgtttgtaccaaagccaaactctggctggccaagaggcaaaatccatgtttggtgaccagagctgtatatattgatattctcttcctattgacttgctgcctcaacagatctgcaaaggacaaccagccagttctggagagtcttggcttctgggaggaagtcagagggattatctcaggatcagagctgataacgggattcccttgggccctcaaggtgccaggcctgccccagtacctccagagcctcaccagactagccattgctgcagtgtgggccgcggcagccaagagtggagagcgggagacgaatgtccccatctctttctctcagctgttagaatctgccttccctgaagtgcgctcactaacactggaagccctcttggaaaagttcttagcagcagcctctggacttggagagaagggcgtgccacccttgctgtgcaacatgggagagaagttcttattgttggccatgaaggaaaatcacccagaatgcttctgcaagatactgaaaattctccactgcatggaccctggtgagtggcttccccagacggagcactgtgtccatctgaccccaaaggagttcttgatctggacgatggatattgcttccaatgaaagatctgaaattcagagtgtagctctgagacttgcttccaaagtcatttcccaccacatgcagacatgtgtggagaacagggaattgatagctgctgagctgaagcagtgggttcagctggtcatcttgtcatgtgaagaccatcttcctacagagtctaggctggccgtcgttgaagtcctcaccagtactacaccacttttcctcaccaacccccatcctattcttgagttgcaggatacacttgctctctggaagtgtgtccttacccttctgcagagtgaggagcaagctgttagagatgcagccacggaaaccgtgacaactgccatgtcacaagaaaatacctgccagtcaacagagtttgccttctgccaggtggatgcctccatcgctctggccctggccctggccgtcctgtgtgatctgctccagcagtgggaccagttggcccctggactgcccatcctgctgggatggctgttgggagagagtgatgacctcgtggcctgtgtggagagcatgcatcaggtggaagaagactacctgtttgaaaaagcagaagtcaacttttgggccgagaccctgatctttgtgaaatacctctgcaagcacctcttctgtctcctctcaaagtccggctggcgtcccccaagccctgagatgctctgtcaccttcaaaggatggtgtcagagcagtgccacctcctgtctcagttcttcagagagcttaagacagtggagttcacaagactacgcattcaagaggaaaggactttggcttgcttgaggctgctggcctttttggaaggaaaggaaggggaagacaccctagttctcagtgtttgggactcttatgcagaatcgaggcagttaactcttccaagaacagaagcggcatgttgaagaaaatctgggggactgggatgggggtatgtgtggatttttcctccactaaatctgcaggaaacatgttgaacataaattcaaaaattttatcccaaaaaaaaaaaaaaa

SEQ ID NO: 21 - DNA, 3893 bp, Homo sapiens
  CDS (135)..(3779)
aaaagttgttttgtaggatacaggagagttctcaggtactttataaattggagcagagtaaatccaaacgtgaaccagagaatgagttaaccaaacagcacccttctgtttctttacagcagtataagaatttcatgtcatccatttgcaacagtctttttgaagcattgtttcctggatcttcctactcgactagattttcagctttaaccattttaggttcaatagctgaagtttttcatgtcccagaaggcagaatttatacagtatatcagctgagtcatgatattgatgttggtcgtttccaaacactaatggaatgttttaccagcacttttgaagacgtgaaaattttagcatttgatcttctgatgaagttatcaaaaacagctgtacactttcaggattcggggaaactgcaaggcttatttcaggcagcattggagctcagcacaagcaccaaaccatacgactgtgtgacagcttcctacctgctgaacttcttaatctggcaggatgctctaccgtcatccttgtctgcctacttaactcagcaagttgcatgtgataatggagataggcctgctgctgtggtggaaaggaacacattaatggttatcaaatgcttgatggaaaatcttgaggaagaagtatctcaggctgaaaattctctgcttcaggcagcagcagcatttccaatgtatgggcgagtccactgtataacaggagctttgcagaagttatctctaaacagcctgcagttggtgagcgagtggagacctgtggtagagaagctccttttgatgtcctacaggctttccactgtggtgtctccagtcattcagagctcatcccctgaaggcctcatcccaatggacactgattcagagtcagcaagccgcttacagatgattctgaatgagattcagcctcgagatactaatgattattttaaccaagccaaaatattgaaagaacatgatagctttgatatgaaggacttgaatgctagtgtggtgaatattgatacttctacagaaatcaaaggtaaagaagtaaaaacatgtgatgtaactgcgcagatggtgctggtatgttgttggagaagtatgaaggaagttgctttacttttaggcatgttgtgccagcttctgcccatgcagcctgtgccagaatcttctgatggattattgacggtggagcaggtaaaagaaataggagattactttaaacaacaccttttgcagtccaggcacagaggagcatttgaattggcttatactggttttgtgaaactcactgaagtactaaacaggtgcccaaatgtgagtctgcaaaagctgccagaacagtggctatggagtgttttagaggaaattaaatgcagtgatccttcatctaaactctgtgctacaaggcgcagtgctggaattcctttctacatacaggcactgttggcatctgaaccaaagaaaggcagaatggatttgttgaaaataacaatgaaagagttaatctctttggctgggcctacagatgacatacagagtacagtcccccaggttcatgctttaaatatccttagagcattgttcagagatacgcgcctgggagaaaatattattccttatgttgctgatggagctaaggctgcaattctgggttttacatcaccggtctgggcagtgcgaaattcatccacacttctctttagtgccttgatcacaagaatttttggagttaaaagggcaaaggatgaacattccaaaacaaataggatgacagggagagagtttttctctcgtttcccagaactctatccttttcttctcaaacagttggaaactgtagccaatacagtagacagtgatatgggagaaccaaatcgtcatccaagcatgtttctcttacttttggtgttggagagactctacgcttccccgatggatggtacttcttctgctctcagcatgggaccttttgttcccttcattatgaggtgtggtcactcacctgtctaccactcccgtgaaatggcagctcgtgccttggtcccatttgttatgatagatcacattcctaataccattcgaactctgttgtccacactccccagctgcactgaccagtgtttccggcaaaaccacattcatgggacacttctccaggtttttcatttgttgcaagcctactcagactccaaacacggaacgaattcagacttccagcacgagctgactgacatcactgtttgtaccaaagccaaactctggctggccaagaggcaaaatccatgtttggtgaccagagctgtatatattgatattctcttcctattgacttgctgcctcaacagatctgcaaaggacaaccagccagttctggagagtcttggcttctgggaggaagtcagagggattatctcaggatcagagctgataacgggattcccttgggccctcaaggtgccaggcctgccccagtacctccagagcctcaccagactagccattgctgcagtgtgggccgcggcagccaagagtggagagcgggagacgaatgtccccatctctttctctcagctgttagaatctgccttccctgaagtgcgctcactaacactggaagccctcttggaaaagttcttagcagcagcctctggacttggagagaagggcgtgccacccttgctgtgcaacatgggagagaagttcttattgttggccatgaaggaaaatcacccagaatgcttctgcaagatactgaaaattctccactgcatggaccctggtgagtggcttccccagacggagcactgtgtccatctgaccccaaaggagttcttgatctggacgatggatattgcttccaatgaaagatctgaaattcagagtgtagctctgagacttgcttccaaagtcatttcccaccacatgcagacatgtgtggagaacagggaattgatagctgctgagctgaagcagtgggttcagctggtcatcttgtcatgtgaagaccatcttcctacagagtctaggctggccgtcgttgaagtcctcaccagtactacaccacttttcctcaccaacccccatcctattcttgagttgcaggatacacttgctctctggaagtgtgtccttacccttctgcagagtgaggagcaagctgttagagatgcagccacggaaaccgtgacaactgccatgtcacaagaaaatacctgccagtcaacagagtttgccttctgccaggtggatgcctccatcgctctggccctggccctggccgtcctgtgtgatctgctccagcagtgggaccagttggcccctggactgcccatcctgctgggatggctgttgggagagagtgatgacctcgtggcctgtgtggagagcatgcatcaggtggaagaagactacctgtttgaaaaagcagaagtcaacttttgggccgagaccctgatctttgtgaaatacctctgcaagcacctcttctgtctcctctcaaagtccggctggcgtcccccaagccctgagatgctctgtcaccttcaaaggatggtgtcagagcagtgccacctcctgtctcagttcttcagagagcttaagacagtggagttcacaagactacgcattcaagaggaaaggactttggcttgcttgaggctgctggcctttttggaaggaaaggaaggggaagacaccctagttctcagtgtttgggactcttatgcagaatcgaggcagttaactcttccaagaacagaagcggcatgttgaagaaaatctgggggactgggatgggggtatgtgtggatttttcctccactaaatctgcaggaaacatgttgaacataaattcaaaaattttatcccaaaaaaaaaaaaaaa

SEQ ID NO: 22 - DNA, 779 bp, Homo sapiens
  CDS (375)..(695)
atatcttttttttttttttttttttttcagagtgctagggctttattacaaatggagttgactgctagagagacccttctccaatctttcttctgtaccttcttccctcccaaagacatccctctaggggaggtcagtaggccattaggtaggaggaaatctggagagtgaaaaggggccttgcttttgtcaaagtcctctgaaacaaccactgagtctgaaggctggctccagttgagaatcttctagtggaagaggtttagctctcatcttcaaggtccttcatttctacatcctggggggcttttgtcttcttttgccttttgagctgtggttcactagtcctggctggctttgaaggggcttccacttccatggctgtcttctctttctgggcaagccggatctgctggaggagttttctgcgcttcttccctgacagtgtaatgttggcacgtgcactggacgcccgcttcttgaggtggtgccgcgtgatcagcccttggtctatcacagccccgaccacccggtgcctcagacgccgctcccgattcaacacccgccggcgtttgaacagcttcttcttcagctcctgccggggagaaagatgcgaatcagatggagtgggctcgccgcgacccggggcccctccaccaggcagccccggcccctcactgatcccatctcgtgcgagataaaagggctcaggaacgcttgaggaaacaaagtcgcggcccccacacagtcaccgttcggggccggttgatctttccacgaaa

SEQ ID NO: 23 - DNA, 5761 bp, Homo sapiens
  CDS (163)..(5148)
acctttccattcagtcgcccaacatggctggagcgcggcggaggtgagccggccgcccgcccgcagacgccccagcctactgcgccagagtcccgcggccccagtggcgcctcagctctgcggtgccgaggcccaacggctcgatcgctgcccgccgccagcatgttgggcgccccggacgagagctccgtgcgggtggctgtcagaataagaccacagcttgccaaagagaagattgaaggatgccatatttgtacatctgtcacaccaggagagcctcaggtcttcctagggaaagataaggcttttacttttgactatgtatttgacattgactcccagcaagagcagatctacattcaatgtatagaaaaactaattgaaggttgctttgaaggatacaatgctacagtttttgcttatggacaaactggagctggtaaaacatacacaatgggaacaggatttgatgttaacattgttgaggaagaactgggtattatttctcgagctgttaaacacctttttaagagtattgaagaaaaaaaacacatagcaattaaaaatgggcttcctgctccagattttaaagtgaatgcccaattcttagagctctacaatgaagaggtccttgacttatttgataccactcgtgatattgatgcaaaaagtaaaaaatcaaatataagaattcatgaagattcaactggaggaatttatactgtgggcgttacaacacgtactgtgaatacagaatcagagatgatgcagtgtttgaagttgggtgctttatcccggacaactgccagtacccagatgaatgttcagagctctcgttcacatgccatttttaccattcatgtgtgtcaaaccagagtgtgtccccaaatagatgctgacaatgcaactgataataaaattatttctgaatcagcacagatgaatgaatttgaaaccctgactgcaaagtcccattttgttgatctcgcaggatctgaaagactgaagcgtactggagctacaggcgagagggcaaaagaaggcatttctatcaactgtggacttttggcacttggcaatgtaataagtgccttgggagacaagagcaagagggccacacatgtcccctatagagattccaagctaacaagactactacaggattccctcgggggtaatagccaaacaatcatgatagcatgtgtcagcccttcagacagagactttatggaaacgttaaacaccctgaaatacgccaatcgagctagaaatatcaagaataaggtgatggtcaatcaggacagagctagtcagcaaatcaatgcacttcgtagtgaaatcacacgacttcagatggagctcatggagtacaaaacaggtaaaagaataattgacgaagagggtgtggaaagcatcaatgacatgtttcatgagaatgctatgctacagactgaaaataataacctgcgtgtaagaattaaagccatgcaagagacggttgatgcattgaggtccagaattacacagcttgttagtgatcaggccaaccatgttcttgccagagcaggtgaaggaaatgaggagattagtaatatgattcatagttatataaaagaaatcgaagatctcagggcaaaattattagaaagtgaagcagtgaatgagaaccttcgaaaaaacttgacaagagccacagcaagagcgccatatttcagcggatcatcaactttttctcctaccatactatcctcagacaaagaaaccattgaaattatagacctagcaaaaaaagatttagagaagttgaaaagaaaagaaaagaggaagaaaaaaagtgtggctggtaaagaggataatacagacactgaccaagagaagaaagaagaaaagggtgtttcggaaagagaaaacaatgaattagaagtggaagaaagtcaagaagtgagtgatcatgaggatgaagaagaggaggaggaggaggaggaagatgacattgatgggggtgaaagttctgatgaatcagattctgaatcagatgaaaaagccaattatcaagcagacttggcaaacattacttgtgaaattgcaattaagcaaaagctgattgatgaactagaaaacagccagaaaagactgcagactctgaaaaagcagtatgaagagaagctaatgatgctgcaacataaaattcgggatactcagcttgaaagagaccaggtgcttcaaaacttaggctcggtagaatcttactcagaagaaaaagcaaaaaaagttaggtctgaatatgaaaagaaactccaagccatgaacaaagaactgcagagacttcaagcagctcaaaaagaacatgcaaggttgcttaaaaatcagtctcagtatgaaaagcaattgaagaaattgcagcaggatgtgatggaaatgaaaaaaacaaaggttcgcctaatgaaacaaatgaaagaagaacaagagaaagccagactgactgagtctagaagaaacagagagattgctcagttgaaaaaggatcaacgtaaaagagatcatcaacttagacttctggaagcccaaaaaagaaaccaagaagtggttctacgtcgcaaaactgaagaggttacggctcttcgtcggcaagtaagacccatgtcagataaagtggctgggaaagttactcggaagctgagttcatctgatgcacctgctcaggacacaggttccagtgcagctgctgtcgaaacagatgcatcaaggacaggagcccagcagaaaatgagaattcctgtggcgagagtccaggccttaccaacgccggcaacaaatggaaacaggaaaaaatatcagaggaaaggattgactggccgagtgtttatttccaagacagctcgcatgaagtggcagctccttgagcgcagggtcacagacatcatcatgcagaagatgaccatttccaacatggaggcagatatgaatagactcctcaagcaacgggaggaactcacaaaaagacgagagaaactttcaaaaagaagggagaagatagtcaaggagaatggagagggagataaaaatgtggctaatatcaatgaagagatggagtcactgactgctaatatcgattacatcaatgacagtatttctgattgtcaggccaacataatgcagatggaagaagcaaaggaagaaggtgagacattggatgttactgcagtcattaatgcctgcacccttacagaagcccgatacctgctagatcacttcctgtcaatgggcatcaataagggtcttcaggctgcccagaaagaggctcaaattaaagtactggaaggtcgactcaaacaaacagaaataaccagtgctacccaaaaccagctcttattccatatgttgaaagagaaggcagaattaaatcctgagctagatgctttactaggccatgctttacaagatctagatagcgtaccattagaaaatgtagaggatagtactgatgaggatgctcctttaaacagcccaggatcagaaggaagcacgctgtcttcagatctcatgaagctttgtggtgaagtgaaacctaagaacaaggcccgaaggagaaccaccactcagatggaattgctgtatgcagatagcagtgaactagcttcagacactagtacaggagatgcctccttgcctggccctctcacacctgttgcagaagggcaagagattggaatgaatacagagacaagtggtacttctgctagggaaaaagagctctctcccccacctggcttaccttctaagataggcagcatttccaggcagtcatctctatcagaaaaaaaaattccagagccttctcctgtaacaaggagaaaggcatatgagaaagcagaaaaatcaaaggccaaggaacaaaagcactcagattctggaacttcagaggctagtctttcacctccttcttccccaccaagccggccccgtaatgaactgaatgtttttaatcgtcttactgtttctcagggaaacacatcagttcagcaggataagtctgatgaaagtgactcctctctctcggaggtacacagcagatcctccagaaggggcataatcaacccatttcctgcttcaaaaggaatcagagcttttccacttcagtgtattcacatagctgaagggcatacaaaagctgtgctctgtgtggattctactgatgatctcctcttcactggatcaaaagatcgtacttgtaaagtatggaatctggtgactgggcaggaaataatgtcactggggggtcatcccaacaatgtcgtgtctgtaaaatactgtaattataccagtttggtcttcactgtatcaacatcttatattaaggtgtgggatatcagagattcagcaaagtgcattcgaacactaacgtcttcaggtcaagttactcttggagatgcttgttctgcaagtaccagtcgaacagtagctattccttctggagagaaccagatcaatcaaattgccctaaacccaactggcaccttcctctatgctgcttctggaaatgctgtcaggatgtgggatcttaaaaggtttcagtctacaggaaagttaacaggacacctaggccctgttatgtgccttactgtggatcagatttccagtggacaagatctaatcatcactggctccaaggatcattacatcaaaatgtttgatgttacagaaggagctcttgggactgtgagtcccacccacaattttgaaccccctcattatgatggcatagaagcactaaccattcaaggggataacctatttagtgggtctagagataatggaatcaagaaatgggacttaactcaaaaagaccttcttcagcaagttccaaatgcacataaggattgggtctgtgccctgggagtggtgccagaccacccagttttgctcagtggctgcagagggggcattttgaaagtctggaacatggatacttttatgccagtgggagagatgaagggtcatgatagtcctatcaatgccatatgtgttaattccacccacatttttactgcagctgatgatcgaactgtgagaatttggaaggctcgcaatttgcaagatggtcagatctctgacacaggagatctgggggaagatattgccagtaattaaacatgaatgaagataggttgtaaactgaatgctgtgataatactctgtattctttatggaaaatgttgtcctgtacttactaggcaaaacgtatgaatcggattaactggaaaatatatctgaattcaactgctgactataaatggtattctaataaaattgtgtactatcctgtgtgcttagttttaagatcaaccaatagatatatatcctacaattgatatattgctttattcacacttttattgtggctgaatttttgtgcctatctataaaacacactttcaaattatttgaattaccaagacgtctgcttttgtgacagtcagaaaacacacctggaatacgatgcagcccaccattaactcattcatgtagtttattcaagtgatttatgtatttaaactaaatattgaaaatgttagtcaaattgtggtttgcttgtcaggtatttatatcagtctgtagtggattcccaaatttcaaagctcttttaatgtaatggacaaaaataagatatgagaatattattgatgaattttcataaggtggaattgatcttaatctactaacagagaagggtagacagtttgtgttaaatgttggcatt

SEQ ID NO: 24 - DNA, 1361 bp, Homo sapiens
  CDS (376)..(471)
ggcttaactgactatagagagtggctgtaagttctggggcaaagcttgattgtattttcagtgatgtatagttacattgtttcatgttaaaatcatcgtgcatggaaagtgaaatgtgcgtatgattttaaattattgtaatatgtactatacccttcccctaaacttctttcattgatgatacacagaattcctctatttttgcttgaaaatagtcctttagattggagtagccttttcttagatccctctatggttccatgagatgaggtgatacctgcaaagcacttttaaagatatttttttaggctaatgtccaagatacagcattgaggaggcagctatgtctaatgagggctctcttgtttgctagagatgagagaaatgtatactaatcattttaatttgtacttaaaatacattttactaatcatattgattttaaatatgacaaattcttctagtagatactaatctttcttgtttatcatattgtcctagagaagcctaggtaaaaatgggttccacctagtctgtttgtataacaccttcccccgtcccctctccatccctgccaattgggctctatgcatattgacaagcaaataagaaaaccttaggtttcttgtatttgaatttccaaaacaataaaaggttttgactcaagatttgcattcaagaagaggcagaaattttgtcttatctttttatcattttgtgaacttgtgtttctctgtatgcttagaaaattttacacacaaggaatgtttgaaaaagtgagaattttagagtgcttgggtggtttttatttggtcagtgctgatgtgttaggtgtttagggaaataatgcttcaggacctttttgacaacacagcttcatgaatgactgggggatatttatgtttgtgctgagaaaagggagggagtgggcaggttggagtggggacctttccattgaaagcagtgcagtcagctgtttcgtagatgcattttttctttatgcttgtaacattgttcttgtgtccataattgactgaaatgtcaagctccaggaatgcaaggcatttatcaggtgaccagaagtagaaccttgttgattatgaaatggaagaataatgtcaaggtagtgggggtaaaatgacaaataagattttactggtgaatttccatgcttagtatgtacattaacctctttttaagttgcatgttaatctggtataacgtattgtgtctggtttatgctttgagtaaaaaggaaaaaaaaagacttgagttacaattgttactctattatgtactattacatataccttttcttttagaaagggttaattataattactattcacaaaaaaaaaaaa

SEQ ID NO: 25 - DNA, 556 bp, Homo sapiens
  CDS (133)..(501)
aatgaatttaaatcccttgatgttcccatttaacagataggaaaacgggggcagggagaagaggaactgtaactcccagtttccttccccttgcacccagaaacaggttctctgagcccctctccccatcccatggagggtggggatgggtcttacgcacccagaccgtgttcctccagggagaatgtgctacgaaacctagcggataaggcctttgaccggcccatctgcgaggccctcctggaccagaggttcttcaatggcattggcaactatctgcgggcagagatcctgtaccggctgaagatccccccctttgagaaggcccgctcggtcctggaggccctgcagcagcacaggccgagcccggagctgaccctgagccagaagataaggaccaagctgcagaatccagacctgctggagctatgtcactcagtgcccaaggaagtggtccagttgggtgaggccaaagatggcagcaacctctgcttcagcaaatgattgtgtaaccctggggcacttgtccctctctggacctgattcaccgatttgg

SEQ ID NO: 26 - DNA, 477 bp, Homo sapiens
  CDS (8)..(250)
gggagacatgttccattttggtctgtgggatctgcatttcttccttatagttatggctcatagagatgactgctctttcaaaggtggttgtggtctattagagcgtttccaatgtccccatacttctttctcgagtgctagtcaaaagcgacttgcagatggtatggaatgtctttgtgagatagaaagaacacagactaggatcagaaaaatctgcctcccaaccctccatggccatcttctggctgtgtgactttaccgccctaactctttaaaatagccccacacctacctgccaggattgtcttcagaattacataaaataacacataccaaagtctctagaatagagcatgtcacataatagactcaacaaaggtcagcatctcttctttctttttgggatgactaaagtagcctaaataaataagtattcgcaatgcatgacttgataacataaacttttgtaatactcta

SEQ ID NO: 27 - DNA, 3043 bp, Homo sapiens
  CDS (215)..(1615)
aagcttgcggccgcaggggccagacccggaacggctccagagcctccagaagcctccgggtctgggcggcgcttcggctcctcccgagccgcctgctagccccgcgccgcactccatccccacaggctggggacgggcccggtgcggctgtgtgggttcgggagcggagttgcagaatccaaggacccattttgttctttctccgcactgctttatgggaggcattatggcccccaaagacataatgacaaatactcatgctaaatccatcctcaattcaatgaactccctcaggaagagcaataccctctgtgatgtgacattgagagtagagcagaaagacttccctgcccatcggattgtgctggctgcctgtagtgattacttctgtgccatgttcactagtgagctctcagagaaggggaaaccttatgttgacatccaaggtttgactgcctctaccatggaaattttattggactttgtgtacacagaaacagtacatgtgacagtggagaatgtacaagaactgcttcctgcagcctgtctgcttcagttgaaaggtgtgaaacaagcctgctgtgagttcttagaaagtcagttggacccttctaattgcctgggtattagggattttgctgaaacccacaattgtgttgacctgatgcaagcagctgaggtttttagccagaagcattttcctgaagtggtacagcatgaagagttcattcttctgagtcaaggagaggtggaaaagctaatcaagtgcgacgaaattcaggtggattctgaagagccagtctttgaggctgtcatcaactgggtgaagcatgccaagaaagagcgggaagaatccttgcctaacctgctacagtatgtgcggatgcccctactaacccccaggtatatcacagatgtaatagatgctgagcctttcatccgctgtagtttacaatgcagggatctggttgatgaagcaaagaagtttcatctgaggcctgaacttcggagtcagatgcagggacccaggacaagggctcgcctagatatgatctatgtctctggaggctttgatggaagcaggcgtcacaccagtatggagcgctatgatccaaacattgaccagtggagcatgctgggagatatgcagacagcccgggaaggtgccggactcgtagtgtccagtggagtgatctactgtctaggaggatatgacggcttgaatatcttaaattcagttgagaaatacgaccctcatacaggacattggactaatgttacaccaatggccaccaagcgttctggtgcaggagtagccctgctgaatgaccatatttatgtggtggggggatttgatggtacagcccacctttcttccgttgaagcatacaacattcgcactgattcctggacaactgtcaccagtatgaccactccacgatgctatgtaggggccacagtgcttcgggggagactctatgcaattgcaggatatgatggtaattccctgctaagtagcattgaatgttatgaccctatcatcgacagctgggaagtcgtgacatccatgggaacccagcgctgtgatgctggtgtttgtgttctccgcgagaagtgaccattgttggagcaccatccagagctagtgaccagtccagtggacagttagtgggagaatcaaaaatcctttccagaatgtctgtttctcactacgtgcaccgggtgattacaggcaccagtgcagtgatgattgtacttatttgacacatactccccgtcgtcctggttcttgttcctgagaagggtgggtaaatattccaggaaaaagaatgcacattgaatggatgtgagagaccacattgcctctcccactgctttggggagcactttcctgtcatttctaacttaccacatgcttggtgtactatatgtatgttgtgcctcatatgttgcaaagaactaaggtgagtatagcctactagatatgggcaatatccagcctagatgattggaaagataccagtttaagtaaacttggtaaaatccaagtcttttttttttttttttttcccaggaacaactacattttctcatatacaggtagctaggggcaacacagtcccattctagagggaaacaaaagggagagccccacaaaactttggggacaagggagagagagactcatctgacacttcttttggaggtcaggatttgtatatcagaattgaagttagaattaagtgaattaaactgaatttgattgtgagtgaacctagaacagcactgaagtattacataacctggaagactgagaagggtatattatttgaaggatctttttatttccccgaggtctttcgcactggagacagcataaaagagtgaacaaatgttgggatgagagaagatgacatcaatgtgggagttcagtataactggggataaactagaagaacctgtgattttacagtcatcttattacctgccagggctcatctagccatggcaatgtttgccttgaatgggggtgaaagcctttctttgttggatcaaatactactacactattacacttccacactatttatttggggatgggctgggagtgacagtagcctagtagttcagctacctgattactgccccattcttttagaagcacatgtctgccaaggagtggtttgtactgctgtgtttggtacatctagtcttttttctgctataagttttccttacctgtcctttagtgtagattttattcatcacaggacagaataatcaaggacaaccaaaatccttttgttagtttcagtacctcagctatcaacatttctgagctaccattcaatgttcctctgtgtcatggagtgaaattcttgttttgtgggtattaggagtgtgggaatgtgataacctaaacaacctttgctctgaaattccatttttccctctttccctgagttgtattgacctacagagttaatttcctttgtatttttttaagaaaatattaaaaatcaacggtctcaaaaaaaaaaaa

SEQ ID NO: 28 - DNA, 1129 bp, Homo sapiens
  CDS (289)..(828)
ggagtggggccccgaaatctgagggtgatcgtagtcactagttgtggcccccatgcaggagcggagagcgggttctggtttctgaaacctcgagggatgggagagtatctgggccgggtggacggaggcagggagatggagagcgctagacaccccattttagagtgcagatggatcccgcttaaggcaacaaaaaaaagcctggtttatgtgtcgacgctttgatgcttttgagtcgtgaggcggtctggctttttgttttgtttgtttgttttgtttttatcttccatgaacagcgcttccgtggatgggcatctcagtggttgtcgtctttttctcttcctttcacctcttttcaggttttattgtgactactgcgatacatacctcacccatgactctccatctgtgagaaagacacactgcagtggaaggaaacacaaagagaatgtgaaagactattatcagaaatggatggaagagcaggctcagagcctgattgacaaaacaacggctgcatttcaacaaggaaagatacctcctactccattctctgctcctcctcctgcaggggcgatgataccacctccccccagccttccgggtcctcctcgccctggtatgatgccagcaccccatatggggggccctcccatgatgccaatgatgggtcctcctcctcctgggatgatgccagtgggacctgctcctggaatgaggccgcccatgggaggccatatgccaatgatgcctgggcccccaatgatgagacctcctgcccgtcccatgatggtgcccactcggcccggaatgactcgaccagacagataaggatagaggggaggccttattgtatcggttttatattacctgttctgcttcaccaggagatcatgctgctgtgatactgagttttctaaacagcataaggaagacttgctcccctgtcctatgaaagagaatagttttggaggggagaagtgggacaaaaaagatgcagttttcctttgtattgggaaatgtgaaaataaaattgtcaactctttcagttaaaagtgtgttccctttttcctcctctctgtgttctctgtgtattataaaagaaatgaaacattccaaaaaaaaaaaa

SEQ ID NO: 29 - DNA, 5843 bp, Homo sapiens
  CDS (1)..(5415)
atgtcggataccaaggtaaaagttgccgtccgggtccggcccatgaaccgacgagaactggaactgaacaccaagtgcgtggtggagatggaagggaatcaaacggtcctgcaccctcctccttctaacaccaaacagggagaaaggaaacctcccaaggtatttgcctttgattattgcttttggtccatggatgaatctaacactacaaaatacgctggtcaagaagtggttttcaagtgccttggggaaggaattcttgaaaaagcctttcaggggtataatgcgtgtatttttgcatatggacagacaggttcgggaaaatccttttccatgatgggccatgctgagcagctgggccttattccaaggctctgctgtgctttatttaaaaggatctctttggagcaaaatgagtcacagacctttaaagttgaagtgtcctatatggaaatttataatgagaaagttcgggatcttttagaccccaaagggagtagacagtctcttaaagttcgagaacataaagttttgggaccatatgtagatggtttatctcaactagctgtcactagttttgaggatattgagtcattgatgtctgagggaaataagtctcgaacggtagctgctaccaacatgaacgaagaaagcagccgctcccatgctgtgttcaacatcataatcacacagacactttatgacctgcagtctgggaattccggggagaaagtcagtaaggtcagcttggtagacctggcgggtagcgaaagagtatctaaaacaggagctgcaggagagcgactgaaagaaggcagcaacattaacaaatcgcttacaaccttggggttggttatatcatcactggctgaccaggcagctggcaagggtaaaagcaaatttgtgccttatcgagattcagtcctcacttggctgcttaaggacaacttggggggcaacagccaaacctctatgatagccacaatcagcccagccgcagacaactatgaagagaccctctccacattaagatatgcagaccgagccaaaaggattgtgaaccatgctgttgtgaatgaggaccccaacgcaaaagtgatccgagaactgcgggaggaagtcgagaaactgagagagcagctctctcaggcagaggccatgaaggcccctgaactgaaggagaagctcgaagagtctgaaaagctgataaaagaactaacagtgacttgggaagagaagctgagaaaaacagaagagatagcacaggaaagacaacgacaacttgaaagcatggggatttccctggagatgtccggtatcaaggtgggggatgacaaatgctacttagtcaatctgaatgcagaccctgctcttaacgaacttctggtttattatttaaaggatcacaccagggtgggtgcagatacctctcaagatatccagctttttggcataggaattcagcctcagcactgtgagattgacattgcatctgatggagacgtcactctcactccaaaagaaaatgcaaggtcctgtgtgaacggcacccttgtgtgcagtaccacccagctgtggcatggtgaccgaatcctatggggaaataatcacttttttagaataaacttacctaagaggaaacgtcgagattggttgaaagactttgaaaaagaaacgggcccgccagagcatgacctggatgcagccagtgaggcttcctctgaaccagactataactatgaatttgcacagatggaagttatcatgaaaaccctgaatagtaatgacccagttcaaaatgtggttcaggtcctggagaaacaatacctagaagaaaagagaagtgccctagaggagcagcggctcatgtatgagcgggaactggagcaactccgccagcagctctcccccgacaggcagccacagagtagcggccctgaccgcctggcctacagcagccagacagcgcagcagaaggtgacccagtgggcagaagagagggatgaactcttccgacaaggcctggcaaaactgcgagagcagctggttaaagctaataccttggtgagggaagcaaacttcctggctgaggaaatgagcaaactcaccgattaccaagtgactcttcagatccctgctgcaaacctcagtgccaataggaagagaggtgcaatagtgagtgaaccagctatccaagtgaggaggaaaggaaagagcacccaagtgtggaccattgagaagctggagaataaattaattgacatgagagacctttaccaagaatggaaggaaaaagttcctgaggcaaagagactctacggaaaacgaggtgaccctttctatgaagctcaagaaaatcacaacctcatcggggtggcgaatgtattcttggaatgcctcttctgtgatgtgaaacttcagtatgcagtccctatcatcagccagcagggggaggttgcagggcgtctccacgtggaagtgatgcgtgttacaggagctgttccagagcgtgtggtggaggatgactcttcggagaattccagtgaaagtgggagccttgaagtcgtagacagcagcggggaaatcattcaccgagtcaaaaagctgacatgtcgggtaaaaattaaagaagcaacggggctgcccttaaacctctcaaattttgtcttctgtcaatacacattctgggaccagtgtgagtctacggtggctgccccggtggtggaccccgaggtgccttcaccacagtccaaggatgcccagtacacagtggccttctcccactgtaaggactatgtggtgaatgtaacagaagaatttctggagttcatttcagatggagcactggccattgaagtatggggccaccggtgtgctggaaatggcagctccatctgggaggtcgattctcttcatgctaagacaagaacactgcatgacaggtggaatgaagtaacgcgaagaatagaaatgtggatctccatattagaattgaatgagttaggagagtatgctgcagtggaacttcatcaggcaaaagatgtcaacacaggaggcatctttcaacttagacagggtcattcccgtagagtacaagtcacggtgaaacctgtgcagcattcagggacactgccacttatggttgaagccatcctgtcagtatccatcggctgtgtaactgccaggtccaccaaactccaaagagggctggacagttaccagagagatgatgaggatggtgatgatatggatagttatcaggaagaagacttaaactgcgtaagggagaggtggtcagatgcactcattaaacgacgagaatacctggatgaacagataaaaaaagtcagcaataaaacagagaaaacagaggacgatgtggagcgggaagcccagcttgtggagcagtgggtagggctgactgaggaaaggaatgctgtgctggtgccagccccaggcagtgggattcctggggcacctgccgactggatcccacctcctggaatggaaacccacataccagttctcttcctcgatttgaatgcggatgacctcagtgccaatgagcagcttgttggcccccatgcatccggcgtgaactccatcctgcccaaggagcatggcagccagtttttctacctgcccatcataaagcacagtgatgatgaggtttcagccacagcctcttgggattcctcggtgcatgattctgttcacttgaatagggtcacaccacagaatgaaaggatttacctaattgtgaaaaccacagttcaactcagccaccctgctgctatggagttagtattacgaaaacgaattgcagccaatatttacaacaaacagagtttcacgcagagtttgaagaggagaatatccctgaaaaatatattttattcctgtggtgtaacctatgaaatagtatccaatataccaaaggcaactgaggagatagaggaccgggaaacgctggctctcctggcagcaaggagtgaaaacgaaggcacatcagatggggagacgtacattgagaagtacactcgaggcgtgctgcaggtggaaaacattctgagtcttgaacggctccggcaggccgtcacagtcaaagaagcactttccaccaaagcccggcacattcggaggagcctcagtacaccaaatgttcataatgtctcttccagccgaccggacctttctggctttgatgaagatgacaagggttggccagagaaccagttggacatgtctgactatagctccagttaccaagatgtagcatgttatggaactttacccagggattctcctcgaaggaataaagaaggttgtacatcagagactcctcatgccttaaccgtcagcccttttaaagcattctctcctcagccaccaaagtttttcaagcccctaatgcctgtaaaagaggagcataagaaaaggatagccctggaagcaaggcctcttctaagccaggagagcatgcctccacctcaggcacataaccctggctgcattgtaccctcaggaagcaatggcagcagcatgccagtagaacacaatagcaaacgtgagaagaagattgactctgaggaggaagaaaatgagctggaagctattaacaggaagctaataagttcacagccttatgtacctgtggagtttgctgacttcagtgtttacaatgccagcttggagaacagggaatggttttcctctaaagtagatctgtcaaactcacgggtcttggagaaagaagtgtcccgtagccctaccaccagcagtattaccagtggctacttttcccacagtgcctccaatgccaccctgtctgacatggtggtcccttctagtgacagctcagaccagctggccattcagacgaaggatgcagactccaccgagcactccacaccatcgcttgtgcatgatttcaggccgtcctcaaacaaagagttgacagaagtcgaaaaaggcttggtaaaggacaagataattgtggtgccactcaaggaaaacagtgccttagccaaagggagcccatcatcccagagcatccctgagaaaaactccaaatcactgtgcaggactggctcatgttcagaactagatgcctgccccagcaaaattagccagccagccaggggattctgccccagggaggtgacggtagaacacaccaccaacatccttgaagaccattctttcacagaatttatgggagtgtcagagggaaaagattttgatggtttgacagattcttctgctggagagctttccagtaggaggagtctaccaaataaaacaggcggcaagactgtctccgatgggctccaccaccccagccagctgcattccaagttagagaatgaccaggtaataattccagaggcagccttttgggttctgtgctgtcaatgagtatgtctaactgtatgtcaaccccagaggcccttcaccgcaacaacttggtaggaaagatgcatccagttgtttgtgacagcaaagatgagcccacagagaagcaggctcacttcctgcacagctgtctctgtcggagagcaagtctgttttgggaactagaacgcaattgtgaaattataagaccagtggatttttttacctggcacatgggttggtgttgaatgaagtgttcagatggataaggatcaatctcatattcattccctgggatgtttagttaccagttttcccaaagtgttctggtagcatctaccatatttcatcaaatctgtgattcctttgattattatatgaaccattattttatgtatcattaagaaaaaatactgccaattaaactctgtcatatcaaaaaaaaaaaa

SEQ ID NO: 30 - DNA, 3906 bp, Homo sapiens
  CDS (1851)..(2123)
tttttttttttttgtcatattaaaaggtgctttatttcattaggcactggaaaatgcaaattaaaaccacaatgctataccagtacacacgtacagacaggcaggcaatattagatattcacattggtgggtgggtgaattggtacaaactgcaatgtctactaaaactaaaaatatgcataccttataagccagcaactctatttctaggtataaatagccaacagaaagccaggtatatgcttaccaaaagacctgaatgtttatagcaacactcttcttagcatccacagtgagaactacccaaatgcccaagaacagtaaaatggataaacaaattgtgttacagtcgtacaatgggcatttagaataaacaatatagaaaaatctcaggaaaatattgagtgaaggaagcagacacaaaggattcaatactgtctgatcccatttatgtgaagttaaaaaacaagtgaaactatgctgtcagaatatagaatagtggttatcactgcagagaaggtgactgaaaaggggattgggaggctggtgggggtgtgtaaaggcctgtttcttattctggaggctagttagatgagttcaatttgtgaacagtcaccaagctgtaggtggacaatttgtgcacttttctgtatcacgctttaataaaccatgtttaaaatcatataggggcatcttggtttcctcccctgaggtgccagtgacatatccagtacctcgaagtccccatcccatgctaagtgaaacgtgctttctcaacacacagctgcaatctctacatttaaagatactgaaactgatatagcgggttctctggctcctggaaaagataagtctactacaaagaaactaggcaaaactttaaataatatgataacagctatcttcccctaaatgttatagagttaataatgtaccttattgtgacttatacaatagaacgtatttgtatagtattgtaatgccagttaagttgtagcatcattatgacaccaatcatttacaatttaaaggaaaataaaatattttaattgattatgggctctttaaaagccaaaaattattaaacccttcaaactagaaaagaccactgaaacatcctacaggttttaatttccaataaagtaaatactgataactataacccacataaaaagctctttggggtcctcaataattagttttagagtaaaaagttcttgagaccaaaatgtgagaaaaccacgtgaattaatcccagccttgttattagatttatttcttcctatgccctcataaggaagcattgctttggaattccaagatgtatgtaattccctggcttggctgaggttgccagttctagttctttattctttttactcaatttttcctttcagtttgttgctttttcttactttttgtccagcattgtgctttaattccattatagagatccattcttcaggtgaactatgcaagtgattttcttttcaagtgatttgaaccaagcgtcttaccagtttttcccgaaattaagctgacctgggacaccttgactccaagcccagcagtaagtctcacatgccacagggcctctcagccatctctgctgagaagggacccttactggcagctaggatccttgagaccatcgtcaagggcaacctggctaaggtaaggttggcctgggacctcttaactgggaaagcagcagctgtgaagttcattgatgagactcagcagatctcctccagacaccatccacaaagtaggaaccatgaaggctcggatcaccccaacatagtgaaacatttgctgtgatcgatattgaggaatctctttgctttgtcatgaagcacactagccaggaggagaagtttgtgaatacctgctcatggcagcaggaaagaaaaaaaaggactgaagcaaattctaccaaaagtgtctgctgtgcaagctgtcaccagaaacgtattgtccacagagatttaaaggcagaaaacacgctcttggatgttaacacaaacatcaagattgcaaattctggcttcagcaacaaattcagcttttacaaactggataccttctgtggcagtcacctctggtcagcagatccctgtttttgatggacagaatttcaaggagctgcaggaggggaactgagtagaatatattcccttctacatgtccattgagtataaaaacctgctcaaaaaatgtatccttctcaatcccagcaagagaggcccttcagagcacattgtgatggatccatgaatgattaggaagcatgaacaggaacttaagccccggacctccgccatactgaatcatggcgtccatgggttacggacaggaaagatccaggactccctgtgaagtgtgatgaagcagcgatcgcctacctgcttgtgggttctaagagatccgaactgtaaggttaccccatcacctaaaacccccactgtcagctgatctgacccacagtggtgcgccttccctataccagggtctctgccagccccgagcagcagcgtttcagcaacctgcctttcccatctttcacggcctctctaagaagactcagaggagccacaaagatcctaagcgggatcaagagacagagcagaaaggcagcactgcgcccgccagccccgtactcgcctggaggggacgaaccccgccccctctgtgaatagcgacctcttaccaaaaccaaaaaagagcaggaattcctcactcggggcaaaagccagtttggccagacctccacgcagaacgacaacagcagccccacagcgctgggcctggggcctcctgggttcctgcctctcaccccccgccttcgtctccccggccaccagcccgggaatcccagtcggtctccttgcagcccaaccaggtctcggtgtcgtaccccacggagagcagctggggggtgcccgccaggtacagctccccagagtgcccctgatacctcccttccacccgcgtcatcagcgcagggggcagagcagagcccccgatgggacaaggtacgcgcggcctggcagcccgacaggtgacggccccggaaatgcggcccaaccgggtgaccccagcctctccctcaaacaaaggccgcagacagcagggggccgccgggagcttcttcagcaagttcaggttcaagttcacaagctggactcttagctgcgggtttgcccaaaggaacctgaaagaacctgaaagcaaagacgggggaggacactccgacctcacatgggggcagcagaggcagtgatttaaaaatggctttccagagacccagccgcgctccctgcccttgaggcggaggctggaggtcgcgagtcggtggagccccgctcggtgctgcggagactgcagtggcggctgggacccggagccgtgggcgaggccggcgcgaagaactaagggaggactcaggcgacaactccagcagcctctccactttggtcccccgaagcgccggtccagaagctcctcggcctccacgagcgtcgccacccaggtcaccacgcctgggggccgagaggttcagctgctcgcacccgggccccgcatcttggtcccgagcgtcttccccgggccttctcccctctcttgccggtctccgccttcccttccgccttcctgcgcttttgtgtttcagctagtttgagatgactttctgtgtcacttgtacccaacagagtcgcataggtcactttatctttggggaaagttcatccttttctagctgagtcacactgcccttttaatatcctgagatacatgctgaactacaatactattgacacgttttatgttcaatagtagaatggatggaggaagagaaagaaaatgaaccagtattatatttgcaaaatgaaaatcaatccttct

SEQ ID NO: 31 - DNA, 1010 bp, Homo sapiens
  CDS (16)..(924)
attcttccggtggagatggctgcggccgtggcggggatgctgcgagggggtctcctgccccaggcgggccggctgcctaccctccagactgtccgctatggctccaaggctgttacccgccaccgtcgtgtgatgcactttcagcggcagaagctgatggctgtgactgaatatatccccccgaaaccagccatccacccatcatgcctgccatctcctcccagccccccacaggaggagataggcctcatcaggcttctccgccgggagatagcagcagttttccaggacaaccgaatgatagccgtctgccagaatgtggctctgagtgcagaggacaagcttcttatgcgacaccagctgcggaaacacaagatcctgatgaagatcttccccaaccaggtcctgaagcccttcctggaggattccaagtaccaaaatctgctgcccctttttgtggggcacaacatgctgctggtcagtgaagagcccaaggtcaaggagatggtacggatcttaaggactgtgccattcctgccgctgctaggtggctgcattgatgacaccatcctcagcaggcagggctttatcaactactccaagctccccagcctgcccctggtgcaggggggagcttgtaggaggcctcacctgcctcacagccccagaccactccctgtccagcacagccctccagtgacaccctgttggaccagtacatcagagagcacgcgagaaggatctgtcatggtcggcatgggaagcagatctgacactgttccgactcgtaggcagctgttaagccagctgggcataaatacctctgggttattgggggcccccaatggccttggcacgaccggggccgggacgggttgcgacatggtcccagatggattggcgttagcgcctgcgaagaggtcctaagttagcaccggtcgtatcccacggaggaggagatcctcccgcgaaagaaaagtgccgccttattcctgccgcccggcgcaaca

SEQ ID NO: 32 - DNA, 3075 bp, Homo sapiens
  CDS (433)..(1893)
ccccttgcggccgccagcagtgacaccatgtgaccggcacggctcactgacacgcagctttggttaaagagcgggcgcacaggaggggaggagaccgcgcgcgggacggggaggaatggcctgtccgcgttaaaccatcacaagccatggttgcggaagggccacgcgtcccccagtaggagaatgactccgattcgtgaccctcagcgccggtgcatgtcgatatatttattgagtgtctactgggtgccaggctctatatctatgtgcatagaaaaaccctggaaggccatacaacaatatatatagagtgatcgtctctgcttgctgagctaacaggggtgtcaagcttccattttggtatctacttctaaatacactcagaacaggagaaatttggactaattttcaaactacagacactttctaatcatgatgcatttcaaaagtggactcgaattaactgagttgcaaaacatgacagtgcccgaggatgataacattagcaatgactccaatgatttcaccgaagtagaaaatggtcagataaatagcaagtttatttctgatcgtgaaagtagaagaagtctcacaaacagccatttggaaaaaaagaagtgtgatgagtatattccaggtacaacctccttaggcatgtctgtttttaacctaagcaacgccattatgggcagtgggattttgggactcgcctttgccctggcaaacactggaatcctactttttctggtacttttgacttcagtgacattgctgtctatatattcaataaacctcctattgatctgttcaaaagaaacaggctgcatggtgtatgaaaagctgggggaacaagtctttggcaccacagggaagttcgtaatctttggagccacctctctacagaacactggagcaatgctgagctacctcttcatcgtaaaaaatgaactaccctctgccataaagtttctaatgggaaaggaagagacattttcagcctggtacgtggatggccgcgttctggtggtgatagttacctttggcataattctccctctgtgtctcttgaagaacttagggtatcttggctatactagtggattttccttgagctgtatggtttttttcctaattgtggttatttacaagaaatttcaaattccctgcattgttccagagctaaattcaacaataagtgctaattcaacaaatgctgacacgtgtacgccaaaatatgttaccttcaattcaaagaccgtgtatgctttacccaccattgcatttgcatttgtttgccacccgtcagtcctgccaatttacagtgagcttaaagaccgatcacagaaaaaaatgcagatggtttcaaacatctcctttttcgccatgtttgttatgtacttcttgactgccatttttggctacttgacattctatgacaacgtgcagtccgacctccttcacaaatatcagagtaaagatgacattctcatcctgacagtgcggctggctgtcattgttgctgtgatcctcacagtgccggtgttatttttcacggttcgttcatctttatttgaactggctaagaaaacaaagtttaatttatgtcgtcataccgtggttacctgcatactcttggttgttatcaacttgttggtgatcttcataccctccatgaaggatatttttggagtcgtaggagttacatctgctaacatgcttattttcattcttccttcatctctttatttaaaaatcacagaccaggatggagataaaggaactcaaagaatttgggctgcccttttcttgggcctgggggtgttgttctccttggtcagcattcccttggtcatctatgactgggcctgctcatcgagtagtgacgaaggccactgaaacccgccgagaaaaagaaacatccctgttgtctgctcagtcaagtccccacacatcagcaatctctcaccacttcttttgcaagtttacagaagcaaacagaaatgtacaggatacttaaaatggaataactttttggttgcaaaacagagacatggttctataatgcttcatgtccctccaagatttgagatcaatttagggattgtgaattttttttttcaaatttcatacaatcatatttcccagtacttttcacaatcattttttacccatctaactctatgttttgtggcttcccggtctcttagaactttgaaaacatgatatacaataatgtttatttattatacatccagattctgaaataattttcctactgatgttcagctcacactatctgtacctttttagaagagaaaagaatcttgaattgtatatatttattttgctttacagaaaaaaatggtttcgtaaataatttgcctattttggttaacatagcacatggagataatcatctgaaagttatagggcactgccactgctgaatcagagcatgcccaatatttgaggtggctctgatttcctggcagctgaactcgggtagtccagtggcctagctggtaccacatctattcccatccagagacattctctggcaagtgttctcagctgaaaagtggttggggatgattcttaccttggtaattaaatgaagctacacatttgggtaatctagcaaatgaagtattttttccctcttggcaacttgtgtcagagttactctggtctgagtcaactttcgctggggaaaacctatggaacctactgcaaaaagattgtccaaaatgcctaagaaaatactcctctgatgcatttagccttcaaccctacctgtcttgctgaagggagaaaaatgttttagtacattataggcccagcagcttttattcatgtccaccagctagttgcacagagaatcatgtgtacctaactaaggatgatctaggataagtaactcctgttttatattgagtattttagggaagtctttaaaagacttgttttatatctataaatctaggttattacaaatacaagaattttgtaccttaaataagcctcatttctatttcttcttcattaattctccatctagtcttgtgaaaaaaaaaa

SEQ ID NO: 33 - DNA, 793 bp, Homo sapiens
  CDS (60)..(338)
ccaacaaacccgctgaggagtacgctgccgctcctgctcttttcatgtcttaacatggcatgtcttttagtttcattattttcctactccttgtatgtcaagaaattacattttgcatgtcttatggagatgctgttaattgcttcagtgagtgcttttctaatctgcagaccatttacatttcctgtttgcagcatgctgtgtgcaaacactcagtaatttggagtattcaattatttgttagggctcttcctatttccaaatgtgctgaattgtctattgatgggattttcagatcttttcatgagaactggaaatgtagctgggtggcacctacctaggttgctacgtagtgagtagactttctcttgggtatagtaagcctcagacagctttcacttttatctactttacttgtggaaataaaacagtcattttgttctgaaagaataagatagctttctgtagagaaggaattcctacctctaaaagctgccttgagaactcagaactggcagttttctgaggtgatttttaaatttcagtattagggagagtccagcatttgctgacacagattctacataactaatgtatgatagcaaatgcaaaactattataatgtggtgtatcttgcgcatacacaggttagaacaagtagactctggcagcagatctccagagacccaagtttaggttctcatagtgtatttgaagtagttatactcctggcttaagtagtttagtgcctgggagaatccattactgaaaagcatttaacttaaaaaaaaaa

SEQ ID NO: 34 - DNA, 3448 bp, Homo sapiens
  CDS (415)..(2991)
tatgaatgcacagcttgcccatcggggacatacaaacctgaagcctcaccaggaggaatcagcagttgcattccatgtcccgatgaaaatcacacctctccacctggaagcacatcccctgaagactgtgtctgcagagagggatacagggcatctggccagacctgtgaacttgtccactgccctgccctgaagcctcccgaaaatggttactttatccaaaacacttgcaacaaccacttcaatgcagcctgtggggtccgatgtcaccctggatttgatcttgtgggaagcagcatcatcttatgtctacccaatggtttgtggtccggttcagagagctactgcagagtaagaacatgtcctcatctccgccagccgaaacatggccacatcagctgttctacaagggaaatgttatataagacaacatgtttggttgcctgtgatgaagggtacagactagaaggcagtgataagcttacttgtcaaggaaacagccagtgggatgggccagaaccccggtgtgtggagcgccactgttccacctttcagatgcccaaagatgtcatcatatccccccacaactgtggcaagcagccagccaaatttgggacgatctgctatgtaagttgccgccaagggttcattttatctggagtcaaagaaatgctgagatgtaccacttctggaaaatggaatgtcggagttcaggcagctgtgtgtaaagacgtggaggctcctcaaatcaactgtcctaaggacatagaggctaagactctggaacagcaagattctgccaatgttacctggcagattccaacagctaaagacaactctggtgaaaaggtgtcagtccacgttcatccagctttcaccccaccttaccttttcccaattggagatgttgctatcgtatacacggcaactgacctatccggcaaccaggccagctgcattttccatatcaaggttattgatgcagaaccacctgtcatagactggtgcagatctccacctcccgtccaggtctcggagaaggtacatgccgcaagctgggatgagcctcagttctcagacaactcaggggctgaattggtcattaccagaagtcatacacaaggagaccttttccctcaaggggagactatagtacagtatacagccactgacccctcaggcaataacaggacatgtgatatccatattgtcataaaaggttctccctgtgaaattccattcacacctgtaaatggggattttatatgcactccagataatactggagtcaactgtacattaacttgcttggagggctatgatttcacagaagggtctactgacaagtattattgtgcttatgaagatggcgtctggaaaccaacatataccactgaatggccagactgtgccaaaaaacgttttgcaaaccacgggttcaagtcctttgagatgttctacaaagcagctcgttgtgatgacacagatctgatgaagaagttttctgaagcatttgagacgaccctgggaaaaatggtcccatcattttgtagtgatgcagaggacattgactgcagactggaggagaacctgaccaaaaaatattgcctagaatataattatgactatgaaaatggctttgcaattggaccaggtggctggggtgcagctaataggctggattactcttacgatgacttcctggacactgtgcaagaaacagccacaagcatcggcaatgccaggtcctcacggattaaaagaagtgccccattatctgactataaaattaagttaatttttaacatcacagctagtgtgccattacccgatgaaagaaatgatacccttgaatgggaaaatcagcaacgactccttcagacattggaaactatcacaaataaactgaaaaggactctcaacaaagaccccatgtattcctttcagcttgcatcagaaatacttatagccgacagcaattcattagaaacaaaaaaggcttcccccttctgcagaccaggctcagtgctgagagggcgtatgtgtgtcaattgccctttgggaacctattataatctggaacatttcacctgtgaaagctgccggatcggatcctatcaagatgaagaagggcaacttgagtgcaagctttgcccctctgggatgtacacggaatatatccattcaagaaacatctctgattgtaaagctcagtgtaaacaaggcacctactcatacagtggacttgagacttgtgaatcgtgtccactgggcacttatcagccaaaatttggttcccggagctgcctctcgtgtccagaaaacacctcaactgtgaaaagaggagccgtgaacatttctgcatgtggagttccttgtccagaaggaaaattctcgcgttctgggttaatgccctgtcacccatgtcctcgtgactattaccaacctaatgcagggaaggccttctgcctggcctgtcccttttatggaactaccccattcgctggttccagatccatcacagaatgttcaagttttagttcaactttctcagcggcagaggaaagtgtggtgccccctgcctctcttggacatattaaaaagaggcatgaaatcagcagtcaggttttccatgaatgcttctttaacccttgccacaatagtggaacctgccagcaacttgggcgtggttatgtttgtctctgtccacttggatatacaggcttaaagtgtgaaacagacatcgatgagtgcagcccactgccttgcctcaacaatggagtttgtaaagacctagttggggaattcatttgtgagtgcccatcaggttacacaggtcagcggtgtgaagaaaatataaatgagtgtagctccagtccttgtttaaataaaggaatctgtgttgatggtgtggctggctatcgttgcacatgtgtgaaaggatttgtaggtaagatgtttccagtcttcctatgttgtcttaaaatcttgtaaaccaccacaaattagtacatttcttaacatatatattaatgtgaatttttggattttattactgtatggtgattatgtaagagaaagtcctcattttctgaggaaatacacactgaggggtttggggtaaaagggcatgcaggtctgcaatttactctcaaatggttcagcaaaaaataatttgtgtatgtggtgtgtgtgtgtaaaggcaaactttcaagaaggaactggagacaaatcatgtaatatgatattgcaaacagatgtacaataatatggtttaaaagtgtatgcttaatttctaaagagtaaatccaagaaagtgtccagtgaaggaaaaaggcaagatcaaagaaacaggcaagttttgaatggaatttactagctttatttcttaacattatctcaattagatgtctattaccaaacttaatttcaacaaaaagtaagattt

SEQ ID NO: 35 - DNA, 707 bp, Homo sapiens
  CDS (8)..(601)
ctcagtcatgccagtgcctgctctgtgcctgctctgggccctggcaatggtgacccggcctgcctcagcggcccccatgggcggcccagaactggcacagcatgaggagctgaccctgctcttccatgggaccctgcagctgggccaggccctcaacggtgtgtacaggaccacggagggacggctgacaaaggccaggaacagcctgggtctctatggccgcacaatagaactcctggggcaggaggtcagccggggccgggatgcagcccaggaacttcgggcaagcctgttggagactcagatggaggaggatattctgcagctgcaggcagaggccacagctgaggtgctgggggaggtggcccaggcacagaaggtgctacgggacagcgtgcagcggctagaagtccagctgaggagcgcctggctgggccctgcctaccgagaatttgaggtcttaaaggctcacgctgacaagcagagccacatcctatgggccctcacaggccacgtgcagcggcagaggcgggagatggtggcacagcagcatcggctgcgacagatccaggagagactccacacagcggcgctcccagcctgaatctgcctggatggaactgaggaccaatcatgctgcaaggaacacttccacgccccgtgaggcccctgtgcagggaggagctgcctgttcactgtgatcagcc

SEQ ID NO: 36 - DNA, 708 bp, Homo sapiens
  CDS (8)..(439)
ctcagtcatgccagtgcctgctctgtgcctgctctgggccctggcaatggtgacccggcctgcctcagcggcccccatgggcggcccagaactggcacagcatgaggagctgaccctgctcttccatgggaccctgcagctgggccaggccctcaacggtgtgtacaggaccacggagggacggctgacaaaggccaggaacagcctgggtctctatggccgcacaatagaactcctggggcaggaggtcagccggggccgggatgcagcccaggaacttcgggcaagcctgttggagactcaggctcacgctgacaagcagagccacatcctatgggccctcacaggccacgtgcagcggcagaggcgggagatggtggcacagcagcatcggctgcgacagatccaggagagactccacacagcggcgctcccagcctgaatctgcctggatggaactgaggaccaatcatgctgcaaggaacacttccacgccccgtgaggcccctgtgcagggaggagctgcctgttcactgggatcagccagggcgccgggccccacttttgagcacagagcagagacagacgcaggcggggacaaaggcagaggatgtagccccattggggaggggtggaggaaggacatgtaccctttcatgcctacacacccctcattaaagcagagtcgtggcatctcaaaaaaaaaaa

SEQ ID NO: 37 - DNA, 1647 bp, Homo sapiens
  CDS (153)..(1298)
gtgaagaaggcgggaagttaatcctcttccaatcagctccccatctcgccctctggcggctccggaccacaggccgagttactctgattaccgccatgctccaagacccgcactgacagtccccacgtgagggaccgcggtgggagtcctaaatgggggaggaggggacgggcggcactgtgcatctgctgtgcctcgcggcctccagcggggtccccctattctgcaggagcagtcgcggcggcgcccccgcccgtcagcagctcccgttctctgtcatcggttccctcaatggagtccacatgtttgggcagaatctggaggtgcagctgagctctgcgaggaccgagaacacgactgtggtccttcttgtgggacttgaagaactgaccaatatccgcaacgtggagagactgaagaaggacttgagggccagttattgcctcatcgacagcttcctgggggactcggagctcatcggggacctgacccagtgtgtggactgcgtgattcctccagaggggtccctcttgcaggaagccctctccgggttcgctgaggccgcgggcacgaccttcgtcagtctggtggtgtccggccgggtggtggcagcaacagagggttggtggcggctggggacgcccgaggccgtgctgctcccctggctggtggggtccctgccgccgcagaccgctcgcgactacccggtgtacctgccgcacgggagccccacggtcccacaccggctcctgaccctgactctgctgccgagcctggagctgtgtctactctgcgggccgagcccacccctcagccagttgtatccacagcttctggagcgctggtggcagccactgctggacccgttgcgggcctgtctgccgttgggaccccgggcgctgcccagtggcttcccccttcacacagacatcctcgggctgctgctcctccacctggaactgaagcgctgcctcttcaccgtggagcccttgggggataaagagccttcaccagaacagcgccggcgcctcctccgaaacttctataccctggtcacctccacgcacttcccaccagagccagggccaccagagaagacagaagatgaggtctaccaggcccagctgcccagagcttgctacctggtgttggggactgaggaaccaggcacaggagtgcgtctggtggccttgcagctggggcttcggcggctgctgctgctgctgtctccccagagtcccacccatgggctgcgaagcctggccacccacactctgcatgccctcaccccacttctttgactacctagcagtgggtgatggacacagacatggggctgttagcgtctctctgtttattcgctcacaataatacacagcccctggatggggagggggcagtaagaccacgaacgcttaccttttgctgccattatgtactgtagctcctgtgtgcgcgcttacatgtgattgacgttacataagcagaggcccttgctttgttcctctcctccaggggactcatattctggttggagcgcctccccggtgtcctatcctgggggggggggaggggcgccgtcttccctacgcgcaattcctgcaggaggtgccgcgcccccgatcgcgttcggctgtcggcgcggcc

SEQ ID NO: 38 - DNA, 1047 bp, Homo sapiens
  CDS (58)..(786)
ttggggaagctgggttggctgggttggtagctcctacctactgtgtggcaagaaggtatgggtcatgaacagaaccaaggagctgcgctgctacagatgttaccacttctgtggctgctaccccactcctgggccgtccctgaagctcctactccaatgtggccagatgacctgcgactctctgaggcctacgacgaggaccagcttttcttcttcgacttttcccagaacactcgggtgcctcgcctgcccgaatttgctgactgggctcaggaacagggagatgctcctgccattttatttgacaaagagttctgcgagtggatgatccagcaaatagggccaaaacttgatgggaaaatcccggtgtccagagggtttcctatcgctgaagtgttcacgctgaagcccctggagtttggcaagcccaacactttggtctgttttgtcagtaatctcttcccacccatgctgacagtgaactggcagcatcattccgtccctgtggaaggatttgggcctacttttgtctcagctgtcgatggactcagcttccaggccttttcttacttaaacttcacaccagaaccttctgacattttctcctgcattgtgactcacgaaattgaccgctacacagcaattgcctattgggtaccccggaacgcactgccctcagatctgctggagaatgtgctgtgtggcgtggcctttggcctgggtgtgctgggcatcatcgtgggcattgttctcatcatctacttccggaagccttgctcaggtgactgattcttccagaccagagtttgatgccagcagcttcggccatccaaacagaggatgctcagatttctcacatcctgcccaggatctcctcttagggtagaagaagtctctgggacatccctggggtgtgtgtgtagatttcccacctggggactctgctgtccctgggcttgcatcccagggatcccagagtggcctgcctatcacaaccacatcccttccccccacaaggcaataaatctcatttctttaaaaaaaaaa

SEQ ID NO: 39 - DNA, 1964 bp, Homo sapiens
  CDS (140)..(1729)
tttcgtcgcgttggctgggtggcctccattgtcgggctgctgctctcagcggcggggctcgccagcgcttcagtgggcggggacgcggcaggtgactccagaccaaggaggatgagctgctgtccctggaagagaacggatggagggaagcagctcctacgaagttccctctgtggctgctgctgatctggaggagggtgctggtcagactaggagcttgcctgccaccccctccaaagatgttcacaagggtgttggaggcatcatcttttcctcctcaccgattttagacttgagtgaaagtggtctgtgccgtttggaggaggtctttagaatccccagccttcaacaattgcatctgcaaaggaatgccctgtgtgtgattcctcaagatttctttcagttgcttccgaacctgacttggctggacctccggtacaatagaattaaagcgcttccttctgggattggagctcaccagcatttgaaaactttgcttttagaaagaaatcctatcaaaatgttacctgtggagctggggagcgtaaccacgctgaaagcactgaacctaagacactgccctctggaattccctcctcagctcgttgtgcagaagggattggtggctatccagcgcttcctgcggatgtgggcagtagaacactctctccccagaaatccaacttctcaagaggctccaccggttagagagatgaccctctgtgacctcccgagcccaggactggagttgtctggagaccacgcgtctaaccaaggagctgtgaacgctcaggacccagagggggctgtgatgaaagagaaggccagctttctcccgcctgtggaaaagccagacctgagtgaactcaggaagtctgcggactcctcagagaactggcccagcgaggaggagatcaggcgcttttggaagctgaggcaggagattgttgagcacgtgaaggcagacgttctgggagatcagctcttgacgagggaattacctccaaatctcaaggcggccttgaacattgagaaagaactaccaaagccaagacacgttttcagaaggaagacagcctcctccaggagcatcttacccgacctcttgtcaccgtaccaaatggcgatccgagcaaaaagactggaagagagccgagcggcggcgctccgagagctccaggagaagcaggctctgatggagcagcagagacgagagaaaagggcactgcaggagtggagagagcgagcccagaggatgaggaagaggaaggaagagctcagcaaactcctgcctccgcggaggagcatggtggcatcaaagattccctctgccacagatctgatagataacaggaaagtaccactgaatccgcctggaaaaatgaaaccaagcaaagagaaatcgccacaagcaagtaaagaaatgagtgccctgcaggagagaaatttagaagagaagataaaacagcacgtcctccaaatgcgtgagcaaagaagattccatggccaggccccactggaggagatgaggaaggctgccgaggatctggaaattgccacagagctacaggatgaagtattgaagctaaaattgggattaaccttgaacaaagatcgtcgacgggcggccctcactggaaacctttcgcttggcctgccggcagcacagcctcaaaatacattttttaacacaaaatatggagaatcaggaaatgttcgcagataccagtgacaccaggtggctggactgatggagacgtcttcagacaggagccgctcagtcttctttcccgggcgtcgcctcctgtgtggtgccggaagagcgccaggttcagtgttaccctgagggctgatttcgcgcagcctgttgttttccttagacaggtccacgtccctctcctgaggctgtggaagatttcagccgtattaaaagaaaggacactgtgaaaaaaaaaaaaaaaaaa

SEQ ID NO: 40 - DNA, 6249 bp, Homo sapiens
  CDS (273)..(6026)
aaataggagaaacagtccagattcttgaaaaatgtgaaggttggtacagaggagtttcaacaaagaagccaaatgtgaaggggatctttcctgcaaattacattcacttgaaaaaggcaattgtcagtaatagggggcagtatgaaactgtggttccacttgaagattctattgtgactgaggttacagcaactctacaagaatgggcaagtttgtggaaacagttgtatgtgaaacacaaagtagatcttttctacaaactacgccatgtgatgaatgaacttattgacctgcgaaggcagctactgtctggtcacctgactcaggatcaggtgcgggaggttaagcggcacatcaccgtgcgcctggactggggtaatgaacatttgggcctggacctggtgcctcggaaggactttgaagtagtggactcggaccagattagtgtctcagatctctataagatgcatttatctagccggcagagtgtacagcaaagcacatcccaggtagatacaatgcgcccacgtcatggggaaacatgtcggatgccagtgccacatcacttcttcctcagcctgaagagtttcacttacaatactattggggaagataccgatgtcttcttttccttatatgacatgagggaaggcaagcagatcagtgagcggtttctggtaagactgaacaagaatggtgggccgaggaacccagagaagatagaacgaatgtgtgccctttttacagatctgagcagcaaagatatgaagagagatttgtatatcgttgcccatgtgatccgaataggccggatgctcctgaacgactcaaagaaaggtcctcctcacctgcactacaggcgaccatatggctgtgcggtcctaagcatcttggatgtcctacagtcactcacagaagtaaaggaagaaaaggattttgttcttaaggtttacacgtgcaacaacgagagtgagtggtcccagatccacgagaacatcatccgaaagtccagtgccaagtactctgcccccagcgccagccatggtcttatcatttctctgcagcttcttcgtggagacatggaacagattcggagagaaaatcccatgatatttaataggggattggcaattacaagaaaattgggatttcctgatgtcattatgccaggtgatatccgcaatgacctgtacctaaccctggagaagggggatttcgagagaggaggaaagagtgtacaaaagaatattgaagtgaccatgtatgtgctttatgcagatggagaaatcttgaaggattgcatcagcttgggttcaggagagccaaataggagttcctaccactcctttgtcctctaccacagtaatagtcctcgctggggagaaattatcaaattgcctatccccattgaccggttccggggctcccacctgcgctttgagttcagacattgttccacaaaggacaaaggggaaaagaaactctttggctttgcattctcaaccctgatgcgtgatgatggcaccaccctctcagatgatattcacgagctttatgtgtacaagtgtgatgagaatagcacgtttaataaccatgctctgtacctgggcctgccctgctgcaaagaggactacaatggctgccctaatattccttctagcctcatcttccagcgcagcaccaaagagtctttcttcatctccactcagctctcctctaccaaactcacccagaatgtggacctcctagctctgctgaagtggaaagccttccccgaccggatcatggatgtactagggcggctgcggcatgtcagtggggaggaaattgttaagtttctgcaggacatcttagatacactctttgtgattttggatgataatacagagaagtacggcctgttggtttttcagtctctggtgttcatcatcaacctgctccgagacatcaagtattttcactttcgacctgtgatggacacgtatatccagaagcactttgctggagctctggcatacaaggagctcatccgctgtttgaagtggtatatggactgctcagcagaactgattcgacaggaccacattcaagaagctatgcgggccttggagtaccttttcaagttcattgtacagtcacggatcctgtactcacgagccacttgtggaatggaagaggaacaattcagatccagtatccaagaacttttccagtccatccggtttgtgctcagtctggacagccgaaactcagaaacactcctttttactcaggctgcactcctcaattctttcccaaccatctttgatgagcttctgcaaatgttcaccgtgcaagaggtggcagagtttgtgagagggacactggggagcatgcccagcactgtgcacattgggcagtcaatggacgtggtcaagctgcagtccattgccaggacagtggatagccgcctgttttctttctcagaatcccgccgcatcctgcttcctgtggttctccatcacattcaccttcacctgaggcagcagaaagagctgctaatttgctcagggattcttggcagcatcttctccatcgtcaagaccagctctctggaggcagatgtcatggaggaagtagagatgatggtggagagcctcctggacgtgctcttgcagactctgctcaccatcatgagcaaatcgcacgctcaggaggcggtaagagggcagcggtgcccgcagtgcacagccgagatcactggcgagtatgtgtcctgccttctctcactgctccgccagatgtgtgacacccatttccagcacctcctggacaacttccagagcaaagatgaactcaaggaatttctgctgaagattttttgcgtgttccggaacctgatgaagatgagtgtcttccctcgggactggatggtaatgagactgctcacaagcaatattatagtcactactgtccagtacctgtcctctgcactgcacaagaatttcacagagactgactttgactttaaggtgtggaattcttactttagcctggcagttctattcataaatcagccaagccttcagctagaaattatcacctcagccaaaaggaagaagattctagataagtatggggacatgcgtgtaatgatggcctatgaactgttcagcatgtggcagaatttgggtgaacataagatccactttattccgggaatgattggtccttttctgggtgtgacactggtcccacagccagaagtacggaatatcatgattcccatctttcatgacatgatggactgggagcagagaaaaaatggcaacttcaaacaggtggaggccgagttgattgacaagctggacagcatggtgtcagaagggaaaggtgacgagagctacagggagctcttcagcctactaacccagctgtttgggccctaccccagcctgctggagaaggttgaacaagaaacatggcgcgagaccggcatttcctttgtgacctcagtcacccgcctcatggaacgtcttcttgactacagggactgcatgaaaggagaggaaacagagaataagaagataggctgcactgttaacctgatgaatttttacaaatctgagattaacaaggaagaaatgtatatccgctacatccataagctttgtgacatgcacttgcaggccgaaaactacacagaggccgcatttaccctgctcctttactgtgagctgctgcagtgggaggaccggccactacgggaattcctccactacccatcgcagacagagtggcagcggaaggagggactgtgccggaagatcattcactacttcaacaaaggcaagagctgggagtttgggatcccactgtgcagggagctggcgtgtcagtacgagagcctctatgattaccagagcctcagctggattcggaaaatggaggccagctactatgacaacattatggagcagcaacgcctggagcctgagttctttcgggtcggcttctatggcaggaagtttcctttctttcttcggaacaaagaatacgtgtgccgtggccatgactacgagaggctggaggccttccagcagaggatgctcagtgagtttccgcaggctgtcgccatgcagcaccccaaccatcctgatgacgccatcctacagtgcgatgcccagtacttgcagatctatgcagtgacgcccattccagattatgtggatgttctgcagatggatagggtaccagatcgagtcaagagcttctatcgcgtcaacaatgtgaggaagttccggtatgacaggccttttcacaaaggccccaaggacaaggagaatgaattcaagagcctgtggattgaacgtaccacactgaccctgacccacagcttgcctggcatctctcggtggtttgaagtggagaggagggaactggtggaggtgagccctctggagaatgccatccaagtggttgagaataagaaccaggagctacgctccctgatcagccagtatcaacacaagcaggtgcatggcaacattaacctgctaagcatgtgcctgaatggtgtcattgatgcagctgtcaatggaggcattgcacgctatcaggaggccttctttgataaagattacatcaacaagcacccaggagatgctgagaagatcacccagctcaaggagcttatgcaggagcaggttcatgtccttggagttgggctagcagttcatgagaagtttgtgcacccagaaatgcggcctctgcataagaagctaattgatcagttccagatgatgcgggccagtctctaccatgagtttccaggtttggataagctaagtcctgcatgttcaggcaccagcaccccacggggaaatgttctggcatcccatagccccatgagtccggagagcatcaagatgacccaccggcacagccccatgaacttgatgggcacaggccgccattcatcatcctctctctcctcacatgcgtctagtgaagcaggaaacatggtgatgctgggtgacggctccatgggtgatgctcctgaggacctgtaccaccacatgcagctcgcgtatcccaaccccaggtaccaaggctcagtcaccaacgtctctgttctgtcctcgtcccaggcaagcccttcttcctccagcctgagttccactcactcagcaccatcccagatgattacctctgccccttccagtgcccgaggctctccctctctgccagataagtaccgccatgcccgtgaaatgatgttgttgctgcccacataccgggaccgcccaagcagtgccatgtatccagcagccatcctggagaacggacagccgccgaatttccagcgagccctgttccagcaagtggtcggagcctgcaaaccctgcagtgatcccaatctgtctgtggctgaaaaaggtcattactccctacactttgacgccttccaccaccctctgggtgatacccccccagccctccctgcccggaccctgcgcaagtctcctctccaccctatcccagcctcccccacaagcccccagtcaggtctggacggcagcaactctacgctgtccggcagtgccagcagcggcgtgtcctccttgagtgagagtaactttgggcactcctcggaggccccacctcgcactgacaccatggactccatgccaagtcaggcctggaatgctgacgaagatcttgagccaccctacctccctgtccactacagcctctctgagtctgccgtcctggactccatcaaggcccagccatgccgaagccactcagccccagggtgcgtcatccctcaggaccccatggacccgcctgcgctgccgcccaagccctaccacccccgcctgccggccctggagcacgatgagggggtgctgctgcgtgaagagactgagaggcctcgaggcctgcaccgcaaggttccattgctcctgggagcgctaaggaggagcaggcccgcatggcctgggagcacggccgaggggagcagtgaggggcaacaaggcggctaggatgccgccctcagtaagcagcttgccaatcactccaggtctgaaaagcaagtcccccagccccaccccagggagccagagaggcttgcactcaggagagaaccacccccaagtctccgttctactgccgtgaactcatgtgttgccatgtacagaggccacagcagcatgaagggttgtggcttccctttttatttttttacatttccatttctatggg

SEQ ID NO: 41 - DNA, 2653 bp, Homo sapiens
  CDS (1794)..(2054)
tttcgtattagtcatcagccagaacttcctgttctgtgggtctggggtcaccagctgagatgtcacctgctttatttctggctttggcctgtggtctgtgatacccatcctgcttgatgttctgcagaatggcacttgactgctgggcatgcatgaagttaagggcaagaaacagtatgccatgtgttctgtaccatcatgtgtctcttcttgcttctgggcccttctactggtgaactttcatcaagatctgcgccatgccgtgtcactatcaagccattaagttttgtctgggttgctgtcagccccagttggcttcctggtcaacaaggacctcaagaactgcctgtggaccgaggccccctaccagtgcatgagacacacacctaccctccccagctttccaggaaccctactggctgccagactgatgggcgggctggtatgtgtggacatgtgttcactgtcattatgctgtggctccaggtgagggtgaggactgggcctatatagaatccagataccattgtcaacttcccttattcccgtctaagatgtgagcagagtgccatagtaggggttctgggaagaggtatttctgatttgtgggcctctgcttgcttgacttcaggtcacttatacttcttattttgcttgcctgccttcatccctcatttcctccctctcattcttctttcctccctccctttcctggtagcctcctttcctccccttctgccttccccttccttctttccttattcttttttattttgtttaaatagtaccacagagaaaacaactgaaaaaccacatttttctacatacagctggggaggtagctgagaacttggcactgcgcacacatactaggttgaaagagagttgaggaaaccagaaggccaagtggatctgctggcaaaccctgaacctgtctcctgcgcttgctctacagttctgaagttgaaaatccttttcatgcctagcatctgcttgagttataaaccccaaggcagccatgtcatagactagtgtttactcttgttttgactttgttttaatgcttcctaagacccaagtgcctcctgctgtttcctcctttgtggtagcctctggccatctggacctcaatccccagctttcccactttcagcagtcctttgctctctttgcttctacctcaaatagccccaggagtgggctttagtctccaatatggagcatctcaagcttctcctgggggatggggattgggatgggcagaatctgttttggatctccgggttatttccagtgggtgtaaaagcagagctgggcctttccctctcttatccctgagggtgggtaagaaggactgtatctacacctgttcttccctaccttctcttttgttagggaggcctcattctaagttcctcaagagagtccttggcttaaagctgtagcaagggtgtgctaggtgggggatttggagcaaaaccgtcgagtaggcatgatactggtatggagtgggcctgcaaaatcagacagaaatggcttgagaagccgcagggggagcatgcctgtctctcagtgatagagtatgggagggacctccctagcttggaaaatgagaattgaaggggttatgaacaaataggatgcctagttgaggatgttcccaaagttttgtccaatcttatcattagtagattttataagccacagagacaaaccagaaacggaataatgttactttggatgctttatttttttgttctaggtgtggctttgtacatgcagaagaatgctatatgctgcacattttgcctttaaagtcttacgactttccccattttagtctaatgggaagatacagatgtgcaagtctgcttttttgttttttgttattattttttttttttttgctctgtgttatggacattttcagacatgcacagaagtggagaggatggtccttggaccccatgtgtccatcacctagctgcatcacttatcagctatggtcaacctggtttcatctgtatctctctcttttcacctgtattgtttattgaaaatccaagacactatgccaatgcaaccgtgactactttgggagattggtagtctcttttgatggtgatagtgatggggtgcactatcataatcacatcaggtctgctttttgcttttaatgttaactaatgaagttccagagatgggccttagaaatgtgttttaagaattaacaaggagtctcaaaaagaaatgagagggatgcttcctttcccttgcatctacaaaacaagagagagactgttctgttgtaaaactctttcaaaaattctgatatggtaaggtacttgagacccttcaccagaatgtcaatctttttttctgtgtaacatggaaacttgtgtgaccattagcattgttatcagcttgtactggtctcataactctggttttggaagaataatttggaaattgttgctgtgttctgtgaaaataacctccccaaaataattagtaactggttgttctacttggtaatttgacaccctgttaataacgcaattatttctgtgttcttaaacagtataaatagttgtaagtttgcatgcatgatggaaaaataaaaacctgtatctctgttaaaaaaaaaaaaaaa

SEQ ID NO: 42 - DNA, 2854 bp, Homo sapiens
  CDS (122)..(2851)
gtaggcagagcaggacgccgctgctgccgccgccaccgccgcctccgctccagtcgcctctggtccttcaaactcacacctcccgggaggagctgtcctggcgccgggtcccgcggggaaaatggtggagccagggcaagatttactgcttgctgctttgagtgagagtggaattagtccgaatgacctctttgatattgatggtggagatgcagggcttgcaactccaatgcctaccccgtcagttcagcagtcagtgccacttagtgcattagaactaggtttggagaccgaagcagcagttcctgttaaacaagaaccagagactgtacctactccagcactattaaatgtgaggcagcagcctccatctactacaacatttgtgctgaatcaaataaatcatcttccacccttgggatctacaattgtaatgactaaaacaccacctgtaacaaccaacaggcaaaccatcactttaactaagtttatccagactactgcaagcacacgcccgtcagtctcagcaccaacagtacgaaatgccatgacctctgcaccttcaaaagaccaagttcagcttaaagatctactgaaaaataatagtcttaatgaactgatgaaactaaagccacctgctaatattgctcagccagtagcaacagcagctactgatgtaagcaatggtacagtaaagaaagagtcttctaataaagaaggagctagaatgtggataaacgacatgaagatgaggagtttttccccaaccatgaaggttcctgttgtaaaagaagatgatgaaccagaggaagaagatgaagaagaaatgggtcatgcagaaacctatgcagaatacatgccaataaaattaaaaattggcctacgtcatccagatgctgtagtggaaaccagctctttatccagtgttactcctcctgatgtttggtacaaaacatccatttctgaggaaaccattgataatggctggttatcagcattgcagcttgaggcaattacatatgcagcccagcaacatgaaactttcctacctaatggagatcgtgctggcttcttaataggtgatggtgccggtgtaggaaaaggaaggacgatagcaggaatcatctatgaaaattatttgttgagtagaaaacgagcattgtggtttagtgtttcaaatgacttaaagtatgatgctgaaagagatttaagggatattggagcaaaaaacattttggttcattcgttaaataagtttaaatacggaaaaatttcttccaaacataatgggagtgtgaaaaagggtgttatttttgctacttactcttcacttattggtgaaagccagtctggcggcaagtataaaactaggttaaaacaacttctgcattggtgcggtgatgacttcgatggagtgatagtgtttgatgagtgtcataaagccaaaaacttatgtcctgttggttcttcaaagccaaccaagacaggcttagcagttttagagcttcagaacaaattgccaaaagccagagttgtttatgctagtgcaactggtgcttctgaaccacgcaacatggcctatatgaaccgtcttggcatatggggtgagggtactccatttagagaattcagtgattttattcaagcagtagaacggagaggagttggtgccatggaaatagttgctatggatatgaagcttagaggaatgtacattgctcgacaactgagctttactggagtgaccttcaaaattgaggaagttcttctttctcagagctacgttaaaatgtataacaaagctgtcaagctgtgggtcatcgccagagagcggtttcagcaagctgcagatctgattgatgctgagcaacgaatgaagaagtccatgtggggtcagttctggtctgctcaccagaggttcttcaaatacttatgcatagcatccaaagttaaaagggttgtgcaactagctcgagaggaaatcaagaatggaaaatgtgttgtaattggtctgcagtctacaggagaagctagaacattagaagctttggaagagggcgggggagaattgaatgattttgtttcaactgccaaaggtgtgttgcagtcactcattgaaaaacattttcctgctccagacaggaaaaaactttatagtttactaggaatcgatttgacagctccaagtaacaacagttcgccaagagatagtccttgtaaagaaaataaaataaagaagcggaaaggtgaagaaataactcgagaagccaaaaaagcacgaaaagtaggtggccttactggtagcagttctgacgacagtggaagtgaatctgatgcctctgataatgaagaaagtgactatgagagctctaaaaacatgagttctggagatgatgacgatttcaacccatttttagatgagtctaatgaggatgatgaaaatgctaacagtaacaccaacagtaacagtagccttataacaagtcaggatgctgtggaaagggctcagcagatgaagaaagacctgcttgataagctagaaaaattagctgaagacctcccccctaataccctggatgaacttatcgatgaacttggtggccctgagaacgttgctgagatgactggccgcaagggacgggttgtgagcaatgatgatggaagcatatcttatgagtcaagatctgaacttgatgtgcctgtggaaatactaaacatcacagaaaaacaacgatttatggatggagataaggaagccttggaagatcgtttggaaaggattaatcgagaactgggttcagttcgcatgacgctaaagaaattccatgttttgcgcacctctgcaaatctttga

SEQ ID NO: 43 - DNA, 1041 bp, Homo sapiens
  CDS (80)..(454)
  misc_feature (1)...(1041): n = a,t,c or g
gtggcctgaggagcggaggggggatgtgtggattccggtgaaagggacctgacaatcgcccccaacccctgacgtgaagatgagcagctcagaggaggtgtcctggatttcctggttctgtgggctccgtggcaatgaattcttctgtgaagtggatgaagactacatccaggacaaatttaatcttactggactcaatgagcaggtccctcactaccgacaagctctagacatgatcttggacctggagcctgatgaagaactggaagacaaccccaaccagagtgacctgattgagcaggcagccgagatgctttatggattgatccacgcccgctacatccttaccaaccgtggcatcgcccagatgttggaaaagtaccagcaaggagactttggttactgtcctcgtgtgtactgtgagaaccagccaatgcttcccattggtgagtgttgaagaagggaaaggaaagcaccgtgtggcagtcttatgggaaggagttggggctcaacacattggagcctgagtcctgaggggaggttaggtaggaatagggggatacctggcctgctgagtctggctgtctcccaggcctttcagacatcncaggtgaagccatggtgaagctctactgccccaagtgcatggatgtgtacacacccaagtcatcaagacaccatcacacggatggcgcctacttcggcactggtttccctcacatgctcttcatggtgcatcccgagtaccggcccaagagacctgccaaccagtttgtgcccaggctctacggtttcaagatccatccgatggcctaccagctgcagctccaagccgccagcaacttcaagagcccagtcaagacgattcgctgattccctcccccacctgtcctgcagtctttgacttttcctttcttttttgccaccctttcaggaaccctgtatggtttttagtttaaattaaaggagtcgttatcgtggtgggaatatgaaataaagtagaagaaaaggccatgaaaaaaaaaaaaaaaaaaaacactt

SEQ ID NO: 44 - DNA, 678 bp, Homo sapiens
  CDS (413)..(601)
  misc_feature (1)...(678): n = a,t,c or g
gccagtccccgcacagaaccacttttactcttcgaagaaaaaatcaagcacagaacagaaaatcntactctcccctcccgccgcactctcccccgttgcccgagatggccaagttcaggcctgtgcaatgccgcttccctctgagcctccctctcaagggccacgcaggcagctgcagcagggccagctgcaggatggggctgccggtcactgaattgtcgttcaaatgcatcatctttgtggcgtctttctcatgcgagcaaagccacgtgctctcctgtctgctgtcacatctgtgcctggattgcttaaatattgtttgtgatggggaggttttaatctggtgatgcagagggaagcagggctgtgggggcacgtttaattggctcccagcagcgtggggagtgcttctatggtgtgtggggttttttgttgcctccctctagaagtgttaccgttttcacgtcctattaatgtcctctggttgttaaattacagcagcacattacagtgcactgggttccctcctggagtgaatacaaacggagggcatctacttgtatttttagaagttttgggagaatttagtgatttgtggctttgatcaatcctgttgactggtgtatgtctgcgcaaacctgtttcaaataaatcttttgttaaagtaaaaaaaaaaaa

SEQ ID NO: 45 - DNA, 754 bp, Homo sapiens
  CDS (45)..(509)
agataaaagcgaaacaggaagtcccgcccctctatggaaagtaaatggtagctcggaagggtcaaaagagtccgcggtttcgccgcgtgacttgctttttgcggctggggaggtctacgcttctagagcttgagccagcggggcgaccctgcagtggcaggactcggcaccgcgccctccaccgccggttggtggcctgcgtgacagtttcctcccgtcgacatcgaaaggaagccggacgtgggcgggcagagagcttcatcgcagtaggaatggcagccccatctatgaaggaaagacaggtctgctggggggcccgggatgagtactggaagtgtttagatgagaacttagaggatgcttctcaatgcaagaagttaagaagctctttcgaatcaagttgtccccaacagtggataaaatattttgataaaagaagagactacttaaaattcaaagaaaaatttgaagcaggacaatttgagccttcagaaacaactgcaaaatcctaggctgttcataaagattgaaagtattctttctggacattgaaaaagctccactgactatggaacagtaatagtttgaatcatagtgaacatcaatacttgttccctatatacgacacttgataattaagatgatcaagaaccagaagatctgtgaagaaatgaaataaaatggtatttagtaagaaatctctattttaagaaaaaaagtaaaacctgttataaacacatgcaaaaaaaaaaaa

SEQ ID NO: 46 - DNA, 3742 bp, Homo sapiens
  CDS (31)..(3267)
gagactggcgtccggtgtgcaggtggccacatggatcctggcagccggtggcggaacctgcccagcgggcctagcctaaagcacttgactgacccctcttatggaatcccgcgggaacagcaaaaggcagcgttgcaggagctgacgcgggcgcacgtggagtccttcaactacgctgtgcacgagggtctcggcctcgcggtgcaggctgatatcaactgggcagtgaatggaatctcaaaaggaatcattaagcagtttcttggctacgttcccatcatggtgaaatccaagctttgcaacttacgtaaccttcccccacaagccctcattgagcaccatgaggaggcagaggaaatggggggctattttataatcaatggcattgaaaaagtcatccgaatgttgattatgcctcggagaaattttcccattgcaatgataagaccaaaatggaaaaccagagggcctggttatactcagtatggagtttcaatgcactgtgtgagggaagaacattccgctgtcaatatgaacctccactacttggaaaatggcacagttatgttgaactttatttaccgaaaagaactgttctttcgtcctttgggatttgcacttaaggcacttgtcagcttttctgattatcagatctttcaggagctcatcaaaggaaaagaggatgattctttccttaggaactctgtttctcagatgttaaggattgtaatggaagagggttgtttgacacaaaaacaggtccttaactacctaggtgaatgcttcagagtaaaactcaatgttcctgactggtacccaaatgagcaagctgcggagttcctgtttaaccagtgcatctgtatccacttgaaatccaatactgaaaagttttatatgctttgtctcatgacgcgaaagctctttgctttagccaaaggagagtgcatggaggacaatcctgatagtttggtgaaccaggaagtcctcacaccgggtcagctcttccttatgttcctgaaggaaaaactggaaggttggttagtgtctattaaaatagcttttgataagaaggctcagaagaccagtgtttccatgaacactgacaatttgatgaggatttttacaatgggcatagaccttacaaaaccatttgaatacctttttgctactgggaatctgcgttctaaaacaggtcttggcctcctacaagattctggactttgtgttgtggctgacaagctgaacttcatacgctacctctcccatttccgctgcgtgcacagaggggctgattttgccaagatgaggacccccccagtacgcaggctgctgccagagtcctggggcttcctttgtcccgtgcataccccagacggggagccctgtggcctgatgaaccacctaactgccgtatgtgaggttgtcacacagtttgtgtatacggcatctattccagctttactgtgcaacttgggggtcactcccattgatggagctccccaccgatcatacagtgagtgctaccctgtcctgctggacggtgtcatggttggctgggtggataaggatcttgctccaggcatcgcagattctcttcgtcattttaaggtgttgagagagaaaagaattcctccctggatggaagtggtccttatacccatgacaggaaaaccaagtctgtacccaggattgttcctttttaccactccttgtagactggtacggcctgtgcagaacttagcattgggcaaagaagagctaattggaactatggaacagatcttcatgaatgtcgctatctttgaggatgaagtttttgctggagttaccacacaccaggaactctttccacacagcctgctgagtgtgattgccaacttcatccctttctctgatcacaaccagagtccacggaacatgtaccaatgccagatgggtaagcaaactatgggctttccacttctcacttatcaagaccgatcggataacaaactgtatcgtcttcagactcctcagagtcccttggtgagaccctccatgtatgattattatgacatggataactatccaattgggaccaatgccatcgttgctgtgatttcttacactggctatgatatggaagatgccatgattgtgaataaggcctcttgggaacgaggctttgcccatggaagtgtctacaagtctgagttcatagacctctctgaaaaaattaaacaaggagatagtagcctggtgtttggcatcaaacctggtgacccacgcgttctgcagaagttagatgacgatggattgccgtttataggagcaaaactgcagtacggagatccgtattacagctacctcaacctcaacaccggggaaagttttgtgatgtactataagagtaaagaaaattgtgttgtggataacatcaaagtgtgcagtaatgacactgggagtggaaaattcaagtgtgtttgcatcactatgagagtgcctcggaacccaactatcggagataaatttgccagtcgccatgggcagaagggcattttaagcagattgtggccggctgaggacatgccttttactgagagtgggatggtcccagacattctgttcaatccccatggttttccatcccgcatgaccattgggatgttaattgagagtatggccgggaagtctgcagctttgcatggtctctgccatgatgctacacccttcatcttctcagaggagaactcggccttagaatactttggtgagatgttaaaggctgctggctacaatttctatggcaccgagaggttatatagtggcatcagtgggctagaactggaagcagacatcttcataggagtggtttattatcagcgcttacgccatatggtctcagacaaatttcaagtaaggacaactggagcccgagacagagtcaccaaccagcctattgggggaagaaatgtccagggtggaatccgttttggggagatggaacgggatgcgcttttagctcatggtacatcttttctccttcatgaccgcctcttcaactgctcagatcggtcggtagcccatgtgtgtgtgaagtgtggcagtttactctctccactgttggagaagccacccccttcttggtctgccatgcgcaacagaaaatacaactgtactctgtgtagtcgcagtgacactatcgatactgtttctgtgccttatgtttttcggtattttgtagctgaactggcagctatgaacatcaaagtgaaactggatgttgtttaacttgatgttgaccttttggattaagaggactatcagattaaagcaaaatgtaattttaattcaatgaagatatcattaccaggttactcttgagatttttcaacggtgttagaactctcaaccaagacctgaaaaccaagtatgcaaggtttctgaatctctctggtagattaactattgacaatgattttctgttatctttgttcaaaaagttcatgtcttctcaaaatatgaaatattgataaatggaagagcatacggtgacaagtctcctttccaaccccaggttccctacaccctgctctcagcaggcagtgagtgtcacacacctgttaatccatcttgagcaggacagtactatacaaatagaatgcaagctgtaatgtaattttatattttcttatagccacgttgaagtaaaaacaaacaggtacagtgttttttaccagctttatagaagtacagttgttac

SEQ ID NO: 47 - DNA, 935 bp, Homo sapiens
  CDS (255)..(878)
gcggcgagttctgggggcgcgacgatggagggagtggcttgggacctgcactcattccctcttgtcccatactggagtttgaggagccactttcccgtccctccactgtggagctgcgttcctgtgagggaggaggccctctgtggtggcgagggtgagctgagcggacgccgccgagtcgaataagaataaaagattctggaggagttggagaagagtgtattcagcccccaaaccacgagatcaacaaagaaatgcacaattttgaggaagagttaacttgtcccatatgttatagtatttttgaagatcctcgtgtactgccatgctctcatacattttgtagaaattgtttggaaaacattcttcaggcatctggtaacttttatatatggagacctttacgaattccactcaagtgccctaattgcagaagtattactgaaattgctccaactggcattgaatctttacctgttaattttgcactaagggctattattgaaaagtaccagcaagaagaccatccagatattgtcacctgccctgaacattacaggcaaccattaaatgtttactgtctattagataaaaaattagtttgtggtcattgccttaccataggtcaacatcatggtcatcctatagatgaccttcaaagtgcctatttgaaagaaaaggacactcctcaaaaactgcttgaacagttgactgacacacactggacagatcttacccatcttattgaaaagctgaaagaacaaaaatctcattctgagaaaatgatccaaggcgataaggaagctgttctccagtattttaaggagcttaatgatacattagaacagaaaaaaaaaaagtttcctaacggctctctgtgatgttggcaatctaattaatcaagaatatactccacaaattgaaaaaaaaaaaaa

SEQ ID NO: 48 - DNA, 6376 bp, Homo sapiens
  CDS (955)..(3705)
atgtttcggaacccagggtctgtgatgggaatccggttacctgctccttccaaaccctctgagactccgccatcttccacttcgtcctctgctttctctgtcatgaatcctgtaattcaagctgttgggtcttcttcagcagtgaatgttatcactcaggcaccatcattgctttcctctggagctagttttgtgtctcaggctggtacattgaccctgaggatttctcctcctgaaccacaaagctttgcaagtaaaacaggctctgaaaccaaaataacttatagctcaggaggacagcctgttggtacagccagtcttattcctctccagtctggtagttttgccttgttacagctcccaggacaaaagcctgttcctagctccattcttcagcatgttgcttcccttcagatgaaaagagaatctcagaatccagaccagaaagatgaaacaaactcaataaaaagagagcaagaaacgaagaaggttctacagtcagaaggagaggctgtagaccctgaggctaatgtaataaaacaaaactcaggagctgctacctcagaagaaactctgaatgattccttggaagataggggtgatcatttggatgaagaatgccttccagaagaaggttgtgcaactgtcaaaccatctgagcattcctgtatcactgggtcacatacagatcaagattataaagatgttaatgaagaatatggggctaggaatcgtaagagttccaaagaaaaagtggctgttctggaagttaggaccatttctgaaaaagccagtaataagacagtccaaaatttaagtaaagtacagcatcaaaaacttggtgatgtgaaggtggaacagcagaaaggatttgacaatccagaagaaaactcaagtgaatttccagtcacctttaaggaagaaagtaaatttgaattgtcaggaagcaaagttatggagcagcaatctaatctacagccagaggccaaagagaaggaatgtggagactctctggagaaagacagggaaagatggagaaaacatctgaagggccccttaaccaggaaatgtgttggagcttcacaggaatgtaagaaagaggcagacgagcagttaattaaagaaacaaagacatgtcaggaaaattcagatgtgtttcagcaagaacaaggcatctctgacttacttggaaaaagtggaactgaagatgccagagttttgaaaactgaatgtgattcttggagtaggatttctaatccttcagccttctccattgttcctaggagagctgcaaaaagcagcagagggaatggacattttcagggtcacttactgctacctggagaacagatacaaccaaagcaagagaagaagggtgggagaagcagtgctgacttcactgttttggatttggaagaagatgatgaagatgataatgagaaaactgatgattctattgatgaaattgtggatgttgtttctgactaccagagtgaggaggttgatgatgtagaaaagaataactgtgtagaatacattgaggatgatgaggagcacgtggacattgagactgtagaagagctctcagaggaaattaatgttgctcacctgaagaccacagcggcccacacacagtcattcaaacagccgtcctgtactcacatctctgcagatgaaaaagcagctgaaaggagtcgaaaggctccaccaattcctctaaaactgaagcctgattactggagtgacaaactacagaaagaagcagaagcgtttgcttattatcgccggacacacactgccaatgagcggcggcggcgtggtgaaatgagggatctctttgagaaattaaagatcacattgggattacttcattcttccaaggtttccaaaagtctcattcttactcgagccttcagtgaaattcagggactaacagatcaggcagacaaattgataggacagaaaaatctcctgactcgaaaacggaatattctgatacggaaagtatcgtctctttcaggtaagacagaagaagtggtcctgaagaagctagagtatatttatgcaaaacagcaagcactagaggcacaaaaaagaaaaaagaagatgggatcagatgagtttgacatatctcccagaattagcaaacagcaggaaggatcttctgcatcatctgtagatcttggacagatgtttataaataacaggagggggaaacctttgattctttccagaaaaaaagaccaggccacagaaaatacctcacccttgaacactccacacacctctgccaaccttgtgatgactccgcaagggcaattgctcaccctaaaaggtcccctattctcaggaccagtggtagctgtttctcctgatctcttagaatctgatcttaagcctcaagttgccggtagtgctgtggctctaccagaaaatgacgacttatttatgatgccacgaattgttaatgtgacatcattggccacagagggaggtttggtagatatgggtggcagcaaatatcctcatgaagttcctgatagcaagccatctgaccatctgaaagacaccgtcaggaatgaagataattccttagaggataagggtagaatctcttccagaggaaacagagatggcagagtgacgttgggtccaacgcaggtttttctggcaaacaaagattctggttatccacaaatagttgacgtttccaatatgcagaaagcacaagagttcttacctaaaaagatttctggtgatatgagagggattcagtataaatggaaagagagtgaatcaagaggggagagagtgaagtcaaaggattcttcatttcataaattaaagatgaaagatctcaaggactcaagcatagagatggaactgaggaaagtaacatcagctatagaggaagcagctcttgattccagtgaactgctgactaacatggaagatgaggatgatactgatgagacactgacttcactgctcaatgaaattgcctttcttaatcaacaactaaatgatgactctgttggcctggctgaactacccagctctatggatacagagttcccaggggatgctcggcgggcttttattagtaaggttcctcctggaagcagagcaactttccaggttgagcacttgggaactggtttgaaagagttgcctgatgttcaaggggagagtgactctatcagtcccctcctcttgcacttggaagacgatgacttttctgagaatgaaaaacaacttgcagaaccagcctctgagccagatgtccttaagattgttattgactctgaaataaaggattccctcctttccaacaagaaagctattgatggagggaagaatacttctggcctccctgcagagcccgaaagtgtgtcctcaccccccaccctacacatgaagactggcttggagaacagcaacagcacagacactttgtggaggcctatgccaaagttggcccctctaggtttaaaagtagctaatccttccagtgatgcagatggtcagagtctcaaggtgatgccttgtttggcacctatagctgccaaagttgggtcagttggacacaaaatgaacttaacagggaatgaccaggaaggccgggaaagcaaggtgatgcctacattggcacctgttgtggctaaattgggcaactcgggggcctcaccaagttctgcagggaaatgaacttacttgtccttaagcagaagccaggctgtgaggggaaattgatctcacctcctttctctgcaggcatctgtttgtttgtgtcttagaacttggatccttgacttcaatgatgcagtggataatgatgggagaaagggggtagggtgctgaccctggtataagaagtactctgaaattctgatcatgttaaaatgtgttacctcacttgtggtgctgggtcccctcatcctctctaagaagatgtgatccattactgaacatgaggtgcccctcttacccaaggaatttataacatgactctggctccacagtggtttctagttcttcccccacaagcgaaagagctgtttgcaactttggagttgctgtagactgaactgtagcttgtagctgttgaattaagtccaaaatctaaggaatgcgatggacttgtgcaaagggatccagaagagacactttttagttgatgtttcaagaatagggagagagaggatgggtaccatggaataccaaagtgaaggactttgtgtcattcagtaaaattttcttttttcatatcctaagtagctcccattccctcaccttttcaatcagaattaacaaattcaagccttcagtaaagtagggatgcttttaacttttattattaattattttgagatcttaaaaaaatagtagttctcccttattatttttgtgggcattgaaaagctcatttcacagtaccagagatttttactgggagtatatattttggaggtaggcatagagggagccctaccccttccacaaattacgttactcaagagacagctaaaataaaatgcattatctccccagaccagagacagtggccaaaataaaaaatcatggggctggaaatttcccaaatcaaaccagcctcctggtgcttgaaggtttcattcactattacctgcacaggatgtaaagaaaagtcacagtaggcactctttaccagggaaataaggcagtatttgaatcacaagatatattttttatctgcaaccatggatccaatgatctgtagagctttttcactcattaactgtcaggatatgaaggactgacagtctgtaaagatatttatatttttgtatagttgttttcatagatttctcaaaggctgaagttttcaacctagaagatgagatttgtattgagtatagaaatgatgtttcctatctagtttgtaaataatcatggtgcacttgaggggtctcttggaaactcctagggggtcaagaatcactattctgaaactgtatagactgggatttagctgctgcattttgcctttcttaaataattatattttggaatgtaacccctgttctgtcttcattgacaggatttgcttgtgttgttaaaacactaacacaagagcttccagtgcctgggccgtgcctaggtgatgctatttcttctatatctcctgtcttctttatcccaaatcccactcagcatatcttcagacctaggttgtaagaccaactttggattggatctagccagtgaattattatttccatggttggttccctttctgttaactctggtaatcaacagattgaaaacggtggaagaacttcttctgaaaattgcagtgggagcaaattcttgttggttttgtgctgcttgcctttctagatctgctcatcagcacttaaccttccctcctctaaaggttactaaagaagcctgaagtaggtaaagagtgctcctcagcttcttatccttccactctttacccagcagatttcattcaatgccttagccaaggagtccagcacctgtctcccctgctaataattgtccttagagatgctagtactttaatccaggtatagcagtttcccgttattttcttgcttgtcgttcccctacatttcctcctgatttcccaagactctctttgtggcttttgagggtcagccaaggagcaggcaagtgagtgaacaatcctcaggaaaagaaggaccattttagcttaacacttcctttttttttttttttttttaagaagaatataggtaaacaggtaatgattcttgattggagataccatttgactcttgatgagagttgtacgaagatggaaatgagggatgattccaggcgttttagggggaaggctgcagataccattctaacccccaagatactgtgttctcaagacctcttagaactaggtgttgtcagggataatttgaggagggcttagtcttcagaacaatcctgcagtcttgacagaaatctaaaatctccaaaaactcctaccctttaaccttaccctagggggaactgatctatgaatattacatgtgtgattatgaaaggtgaagttgagtgagaggagttgaggaacgtggaagacagtgagctctcaccctaacactataagaagcatgatctcaatagaccaataattcacctttttatacatctgtaaataaatggaatgtttttaagaatataattatgtcagatttagcattttcttttatatattaaatatatatatctttccttttctgctttcgaaaagtgactatttttttagaaatctaagaacagaagtttggtgattgaaaggtagaatatataaacctgaaataaagcagttaaaacaattaaaaaaaaaaaa

SEQ ID NO: 49 - DNA, 1127 bp, Homo sapiens
  CDS (319)..(753)
tttcgtcggcgggcgtggttcgagagcgcgcagagtccagactggcggcagggcccgaggggccgacccgcagcgtccctggtctctccagccctcactcggaaccgcacggtacaggtgaaagggggcagacccctcatcatgctttccaggcatctgccacttcccaggaattgtctccctggataaacaaggcgaagtccctggctgtgcagaagcagtagctgtgtggtggcacagtcaggaaaactcgggggccctacagtgacaataccctcccctcccttgggctggacccctctctacagctaggagccaatggcagaagacaaaaccaaaccgagtgagttggaccaagggaagtatgatgctgatgacaacgtgaaaatcatctgcctgggagacagcgcagtgggccaatccaaactcatggagagatttctcatggatggctttcagccacagcagctgtccacgtacgccctgaccctgtacaagcacacagccacggtagatggaaggaccatccttgtggacttttgggacacggcaggccaggagcggttccagagcatgcatgcctcctactaccacaaggcccacgcctgcatcatggtgtttgatgtacagaggaaagtcacctataggaacctgagcacctggtatacagagcttcgggagttcaggccagagatcccatgcatcgtggtggccaataaaattgatggtggggccatccctgcacctgggtgttagcaattcactggggacctgccctcatacatttcctcctccattccccgggcaggcaaccttcagtgattggtcctccctcccacgataagatacaacccttggttggttgcttgcattcttcccaccttataaagaagccagctaagccgacctgccctctttccaagacacagatccctattaactgagctctttctaggacctgtttcccaatcatccctgcctatcccactttctggaatgaaggcctccagtggcccccccctccaaaccttcttcccttcccttgacagacagaccaatgtcctaccttctctctacagcagacataaacgtgacccaaaaaagcttcaattttgaaaaaaaaaaaa

SEQ ID NO: 50 - DNA, 2765 bp, Homo sapiens
  CDS (597)..(2087)
ggaaccgccccggaaccccgggtcgacgatttcgtgctccgaccacgacagggaaaggaactgaccaacactggatgaatttgaccatttcttaagagactggaatgttaagtttctataaatgaatgaaccagttctctcttgtttggagcaatgctgaaattccaagaggcagctaagtgtgtgagtggatcaacagccatttccacttatccaaagaccttgattgcaagaagatacgtgcttcaacaaaaacttggcagtggaagttttggaactgtctatctggtttcagacaagaaagccaaacgaggagaggaattaaaggtacttaaggaaatatctgtaggagaactaaatccaaatgaaactgtacaggccaatttggaagcccaactcctctccaagctggaccacccagccattgtcaagttccatgcaagtttgtggagcaagataatttctgcattatcacggagtactgtgagggccgagatctggacgataaaattcaggaatataaacaagctggaaaaatctttccagaaaatcaaataatagaatggtttatccagctgctgctgggagttgactacatgcatgagaggaggatacttcatcgagacttaaagtcaaagaatgtatttctgaaaaataatctccttaaaattggagattttggagtttctcgacttctaatgggatcctgtgacctggccacaactttaactggaactccccattatatgagtcctgaggctctgaaacaccaaggctatgacacaaagtcggacatctggtcactggcatgcattttgtatgagatgtgctgcatgaatcatgcattcgctggctccaatttcttatccattgttttaaaaattgttgaaggtgacacaccttctctccctgagagatatccaaaagaactaaatgccatcatggaaagcatgttgaacaagaatccttcattaagaccatctgctatcgaaattttaaaaatcccttaccttgatgagcagctacagaacctaatgtgtagatattcagaaatgactctggaagacaaaaatttggattgtcagaaggaggctgctcatataattaatgccatgcaaaaaaggatccacctgcagactctgagggcactgtcagaagtacagaaaatgacgccaagagaaaggatgcggctgaggaagctccaggcggctgatgagaaagccaggaagctgaaaaagattgtggaagaaaaatatgaagaaaatagcaaacgaatgcaagaattgagatctcggaactttcagcagctgagtgttgatgtactccatgaaaaaacacatttaaaaggaatggaagaaaaggaggagcaacctgagggaagactttcttgttcaccccaggacgaggatgaagagaggtggcaaggcagggaagaggaatctgatgaaccaactttagagaacctgcctgagtctcagcctattccttccatggacctccacgaacttgaatcaattgtagaggatgccacatctgaccttggataccatgagatcccagaagacccacttgtggctgaagagtactacgctgatgcatttgattcctattgtgaagagagtgatgaggaggaagaagaaatagcgttagaaagaccagagaaagaaatcaggaatgagggatcccagcctgcttacagaacaaaccaacaggacagtgatatcgaagcgttggccaggtgtttggaaaatgtcctgggttgcacttctctagacacaaagaccatcaccaccatggctgaagacatgtccccaggaccaccaattttcaacagtgtgatggccaggaccaagatgaaacgcatgagggaatcagccatgcagaagctggggacagaagtatttgaagaggtctataattacctcaagagagcaaggcatcagaatgctagcgaagcagagatccgcgagtgtttggaaaaagtggtgcctcaagccagcgactgttttgaagtggaccagctcctgtactttgaagagcagttgctgatcacgatgggaaaagaacctactctccagaaccatctctaggcaactatcaaaaagaagcagaagttcaagtggacaaatttatgtgaaaattcatttaacatataagctgaactctattatggggaatggatacaaaagcagagctcccatcttgactttcaattcctcatcagaagtactggcttctttagagagtagtaagcatggctgcctatgcttggagtcataagtgttatttggactataccctgagataagcttatagatcaagtttggctcccttgaaaagcatttctctcatgtgcgccctcagggcttccagcaggattgagtcaccctgacgatgaccggggagaagccgtgtgctcttcattattttcagctggaggacagagctcagtgcctgactgcctagggtctcatggactgtaggcagcctgccagtgaaggtcactggactctagcctacaacatgctgagctacagcccagaagccagacatgcctgtcttagctgacctgtttttggtccacttttgcccttccatgactaataaggaagatatgtgtgtatttcatacacacacaaggacctggattaaaaatccaaaaagtgattctcttctatgatttatttcaaactcatccatagataattcaagatttgtattcaaaataaacatagttttcacagttacaaaataaaaaaaaaaaa

SEQ ID NO: 51 - DNA, 1573 bp, Homo sapiens
  CDS (363)..(602)
gcacgagcgcaacccagcgaaactccgcggagcgcgcgcggcacgatggacggtcgggtgcagctgatgaaggccctcctggccgggcccctccggcccgcggcgcgtcgctggaggaacccgattccctttcccgagacgtttgacggagataccgaccgactcccggagttcatcgtgcagacgagctcctacatgttcgtggacgagaacacgttctccaacgacgccctgaaggtgacgttcctcatcacccgcctcacggggccagccctgcagtgggtgatcccctacatcaggaaggagagccccctgctcaatgattaccggggcttcctggccgagatgaagcgggtctttggatgggaggaggacgaggacttctaggccgggagacccttgggcctgggggcgggtgctctgggaagagttcgctgtgccagtggccaccgctagggtctccacaggcgccctccctccgcgcctccctccccctcgagccgccgcgatgtcccctgcgctcctgtcccctcccgcgtagtgcttgcctttgttccaggaatagcgctccaggctcctgctgcagctcctgggccgcactctagagcgcgctgcctccgccctcttttgccagcccagcccctccatgcacatttggacgctgtcctgcacttcaggtgcaagctgggctcctgttacatactggacagaccacccacagccgctgctgccaacccacctccactcctccagactgccagccaactacatcattctgcccacagacctacgctaccactgccatcgccatccaccgcatctcaccaacagactgtggctcctagtgatgtggactcacctcggaggtatccgagctggacacagcccctggacagtgatccagacagctggccgtcccccaaggagcctgtcaccttcagcgagacccatttcctccccatccccagagacctcttgtgttcctgccacatagctgccagggcttaagtgtgcctggcaaccaaatcgaatctctcattttctcctgtggaccagttagttttgcctagaatcctgttttcttctgaatttgcagctgtctctctgatgggtgccttttgttcaacacagtaagccctgctcccttccctgctctaatacactacctgtacaaaggttttttccttatttttaataaatgtcagacactattaaatagaaatggagtctcaatgaatatggcacctttccctccctggttctgtaaatagggtccatgtcttcttcaaatgctatgtgccctgtcatactacggctgaagttgactcttgcattataaaaacaaaagactgagtcctgtggagtgtcctagggatggagatcttatcggcaaccatctaatgccaaatgatgacccttctaaaccacgcagtttcatgccacttttgaggcagacattgatctgattttggccaaggcaatgtcaaaagctgtggaaaagctttttgtaaaaggtttccttattttcaaaaaatggctacaaaacacaaatctcaaattgctacataccact

SEQ ID NO: 52 - DNA, 1291 bp, Homo sapiens
  CDS (338)..(1189)
gcgcgaccatcatgtccatgctcgtggtctttctcttgctgtggggtgtcacctggggcccagtgacagaagcagccatatgtgagtgcagggtttatgagacgcagcccagcctgtgggcagagtccgaatcactgctgaaacccttggccaatgtgacgctgacgtgccaggcccgcctggagactccagacttccagctgttcaagaatggggtggcccaggagcctgtgcaccttgactcacctgccatcaagcaccagttcctgctgacgggtgacacccagggccgctaccgctaccgctcgagcgaccgcccgggcaggtcgcgaccatcatgtccatgctcgtggtctttctcttgctgtggggtgtcacctggggcccagtgacagaagcagccatattttatgagacgcagcccagcctgtgggcagagtccgaatcactgctgaaacccttggccaatgtgacgctgacgtgccaggcccgcctggagactccagacttccagctgttcaagaatggggtggcccaggagcctgtgcaccttgactcacctgccatcaagcaccagttcctgctgacgggtgacacccagggccgctaccgctgccgctcgggcttgtccacaggatggacccagctgagcaagctcctggagctgacagggccaaagtccttgcctgctccctggctctcgatggcgccagtgtcctggatcacccccggcctgaaaacaacagcagtgtgccgaggtgtgctgcggggtgtgacttttctgctgaggcgggagggcgaccatgagtttctggaggtgcctgaggcccaggaggatgtggaggccacctttccagtccatcagcctggcaactacagctgcagctaccggaccgatggggaaggcgccctctctgagcccagcgctactgtgaccattgaggagctcgctgcaccaccaccgcctgtgctgatgcaccatggagagtcctcccaggtcctgcaccctggcaacaaggtgaccctcacctgcgtggctcccctgagtggagtggacttccagctacggcgcggggagaaagagctgctggtacccaggagcagcaccagcccagatcgcatcttctttcacctgaacgcggtggccctgggggatggaggtcactacacctgccgctaccggcttgcatgacaacccaaacggctcggacggcgacagcgcgccgctcaagctgactctgactcatcatactgcttgctctgccatacccttcccctcaactgtagcctc

SEQ ID NO: 53 - DNA, 2155 bp, Homo sapiens
  CDS (113)..(1726)
ggaagtagaaggcggtggctgaggcggttccggaggttctagtgtcggagttgggtgcaggcaggtgccatgggcccgcttgaggcacactgaggggacgcggggctgggccatggccggcgctcgggccgccgccgccgctgcctcggcggggtcctcggcctcttcaggcaaccagccgcctcaggagctggggcttggggagctgctggaggagttctcccggactcagtaccgggccaaggatggcagcgggaccggcggctctaaggttgagcgcattgagaagagatgtctggagctgtttggccgagactactgtttcagcgtgattccaaacacgaatggggatatctgtggccactatccccggcacatcgtgttcctggagtatgagagttctgagaaggagaaagacacgtttgagagtaccgtacaggtgagcaagttgcaagacctcatccaccgcagcaagatggcccggtgcagaggacggtttgtctgcccagtaatcctgttcaagggcaagcacatttgcaggtcggccacactggctggatggggagagctgtatggacgctcaggctacaactattttttctcagggggtgcagatgatgcctgggcagatgtggaggacgtcacggaggaggactgtgctcttcgaagtggtgacacgcatctttttgataaggtcagaggctatgacatcaagctgcttcgatacctgtcagtcaaatacatctgtgacctgatggtggagaacaagaaggtgaagtttggcatgaatgtaacctcctctgagaaggtggacaaagcccagcgctatgccgacttcactctcctctccatcccgtatccaggctgtgaatttttcaaggaatataaagatcgggattacatggcagaagggctcatatttaactggaagcaggactacgttgatgccccattgagcatccccgacttcctgactcactctctgaacattgactggagccagtatcagtgttgggatctggtgcaacaaacacaaaactacctgaagctgctgctttccttagttaacagtgatgatgacagcgggctgctggtacactgtatctcaggctgggatcggacccccctcttcatctccctcctgcgcctttccttgtgggctgatgggctcatccacacgtccctgaagcccactgagatcctctacctcactgtggcctatgactggttcctcttcgggcacatgttggtagatcggctcagcaaaggggaggagattttcttcttctgcttcaattttttgaagcatattacctccgaggagttctctgctctgaagacccagaggaggaagagtttgccagcccgggatggaggcttcaccctggaagacatctgcatgctgagacgaaaggaccgtggcagcaccaccagccttggcagcgacttctccctggtcatggagagttccccaggagccactgggagcttcacctatgaggccgtggagctggtcccagcaggagcgccaactcaggcagcttggcttgcagccctgagtgatcgagagactcggctgcaggaggtgcgctcagccttcttggctgcgtacagcagcacagtggggcttcgggcagtagcccccagtccttccggtgccatcgggggcctgctggagcaatttgcccgtggtgttggactccggagcatcagcagcaatgccttgtgaagaagccagcccatgacattttcctgctcctctctcagctgagcccttagcagagaatcaaagccatgcctggccgaaggggtacttccaggtcaggggaaatttcagtcccccatctccatcatgaacatggcagccccaaagctgagcaaggccaaagacagggttttccaacccccagcctcttgactggtgaccaccaccccttcttgtcactgtctcccacccaccccatctttgctgggattcccatcaactctcagaactgtgtggggtttccctggggccttgtggaagccatgacttcacaaagaccctacctgtcagttcttgtttctggggaggagggatcacctgcactgagaatgaggcagtttgacacagatcacaaaataaaatcaaagtctttttgaaaaaaaaaaaaaa

SEQ ID NO: 54 - DNA, 2356 bp, Homo sapiens
  CDS (2)..(1177)
catgcagtccccggcggtgctcgtcacctccaggcgacttcagaatgcccacactggcctcgacctgactgtgccccagcaccaggaggtacggggcaagatgatgtctggacacgtggagtaccagatcctggtggtgacccgtctggctgcgttcaagtcggccaagcacaggcccgaggatgtcgtccagttcttggtctccaaaaagtacagcgagattgaggagttttaccagaaactgagcagtcgttatgcagcagccagcctccccccactacccaggaaggtcctgtttgttggggagtctgacatccgggagaggagagccgtgttcaatgagatcctgcgctgtgtctccaaggatgccgagttggcaggcagcccagagctgctagagttcttaggtaccagatccccaggggctgcagggctcaccagcagagattcctctgtcctggatggcacagacagtcagacagggaatgatgaagaggcttttgacttttttgaggagcaagaccaagtggcagaagagggtccgcccgtccagagcctgaagggcgaggatgctgaggaatccttggaggaggaggaggcgctggaccctctgggcattatgcgctccaagaagcccaagaaacatcccaaagtggccgtgaaagccaagccctcgccccggctcaccatctttgacgaggaggtggaccctgatgaggggctctttggcccgggcaggaagctgtctccacaggacccctcggaggacgtgtcatccatggaccccctgaagctatttgatgatcctgacctcggcggggccatccccctgggtgactccctcctgctgccggccgcctgtgagagtggagggcccacacccagcctcagccacagggacgcctccaaggaactgttcagagttgaagaggacttggaccagattctgaacctgggagctgagcccaaacccaagccccagcttaagcccaagccaccagtggcagctaagccggtgatacccagaaaaccagctgttccccccaaagcgggcccggctgaagctgtggctgggcagcagaagccgcaggagcagatccaagccatggacgagatggacatcttgcagtacatccaggaccacgatacaccagcccaggccgcccccagcctcttctgacccttccatgctggcccctggcccagcaggcctgtctgtggggacatcggtgtgaagggaagggactgggccctgcagggtcagaacctccccacccccaggggaggccaggcagaagcctgggtcacagcacccagaactgcatggttccattttctccggggctgtggggccaaagtagaagcctgcgggctgcgggagcggctctcaccctaggagccagagcccaatgtgtcttattccccgtggacatgaaggggagggagggtgtggggatgccttgccaaccagatgcccagccccaaggatgaagcaagacatgtggggccgtagcgaggtgtcacatggggcagggaagcttcatgcccacgggttctgccagccccagcacagacccaaactggggctgggcctctatccctcctctgcctctgttcgcatagtaagaaggagtgaccgggatcctccccttcccctaccctaagctgtagcctgggtgactgactggcctgggcctggggtggggacgtccccaagccaaattactccagggtctctgctcctcatggctgccaggggcctgcagggtctgggtgggtctcccaggagaggaatactgagtgggagatcggctgtctggagtgttctgatgcaagtctctctctcctgagcctcctcttgatgcaagctctaaagggagaagtcaggccctgcctctccagggtatagacggccctgctaggccccagttcttcctccttccccctttcccaggaaaggccagcccagtccatggccttcttgggcctctgggcacagagccaatgttcgtcattgcagctctcagcaaactgggtcatagctttccccacagctcagcctggggcctgggcagggctcccagcctgcaccgcctcccactgccagtggggcatgattctctcaggcttctgccccgaggccttcgtcgtcctcagggtctggacttggtcagtggcctttcaccagtggagctgccttcccagggagaaggagccgtgcgccagggcagggcccgtgccttagacttctcccgacccccagagcgctggtacacaggtctaggcaccacacagtgctttggaaattctcagtgaatgatgtttaataaagcaaaaaatgtcaaaaaaaaaaaaa

SEQ ID NO: 55 - DNA, 1450 bp, Homo sapiens
  CDS (60)..(1427)
gggtgaggcaggtgccatgggcccgcttgaggcacactgaggggacgcggggctgggccatggccggcgctcgggccgccgccgccgctgcctcggcggggtcctcggcctcttcaggcaaccagccgcctcaggagctggggcttggggagctgctggaggagttctcccggactcagtaccgggccaaggatggcttcgggaccggcggctctaaggttgagcgcattgagaagagatgtctggagctgtttggccgagactactgtttcagcgtgattccaaacacgaatggggatatctgtggccactatccccggcacatcgtgttcctggagtatgagagttctgagaaggagaaagacacaagtggtgacacgcatctttttgataaggtcagaggctatgacatcaagctgcttcgatacctgtcagtcaaatacatctgtgacctgatggtggagaacaagaaggtgaagtttggcatgaatgtaacctcctctgagaaggtggacaaagcccagcgctatgccgacttcactctcctctccatcccgtatccaggctgtgaatttttcaaggaatataaagatcgggattacatggcagaagggctcatatttaactggaagcaggactacgttgatgccccattgagcatccccgacttcctgactcactctctgaacattgactggagccagtatcagtgttgggatctggtgcaacaaacacaaaactacctgaagctgctgctttccttagttaacagtgatgatgacagcgggctgctggtacactgtatctcaggctgggatcggacccccctcttcatctccctcctgcgcctttccttgtgggctgatgggctcatccacacgtccctgaagcccactgagatcctctacctcactgtggcctatgactggttcctcttcgggcacatgttggtagatcggctcagcaaaggggaggagattttcttcttctgcttcaattttttgaagcatattacctccgaggagttctctgctctgaagacccagaggaggaagagtttgccagcccgggatggaggcttcaccctggaagacatctgcatgctgagacgaaaggaccgtggcagcaccaccagccttggcagcgacttctccctggtcatggagagttccccaggagccactgggagcttcacctatgaggccgtggagctggtcccagcaggagcgccaactcaggcagcttggcttgcagccctgagtgatcgagagactcggctgcaggaggtgcgctcagccttcttggctgcgtacagcagcacagtggggcttcgggcagtagcccccagtccttccggtgccatcgggggcctgctggagcaatttgcccgtggtgttggactccggagcatcagcagcaatgccttgtgaagaagccagcccatgacatt

SEQ ID NO: 56 - DNA, 2032 bp, Homo sapiens
  CDS (60)..(2009)
gggtgaggcaggtgccatgggcccgcttgaggcacactgaggggacgcggggctgggccatggccggcgctcgggccgccgccgccgctgcctcggcggggtcctcggcctcttcaggcaaccagccgcctcaggagctggggcttggggagctgctggaggagttctcccggactcagtaccgggccaaggatggcagcgggaccggcggctctaaggttgagcgcattgagaagagatgtctggagctgtttggccgagactactgtttcagcgtgattccaaacacgaatggggatatctgtggccactatccccggcacatcgtgttcctggagtatgagagttctgagaaggagaaagacacgtttgagagtaccgtacaggtgagcaagttgcaagacctcatccaccgcagcaagatggcccggtgcagaggacggtttgtctgcccagtaatcctgttcaagggcaagcacatttgcaggtcggccacactggctggatggggagagctgtatggacgctcaggctacaactattttttctcagggggtgcagatgatgcctgggcagatgtggaggacgtcacggaggaggactgtgctcttcgaagtggtgacacgcatctttttgataaggtcagaggctatgacatcaagctgcttcgatacctgtcagtcaaatacatctgtgacctgatggtggagaacaagaaggtgaagtttggcatgaatgtaacctcctctgagaaggtggacaaagcccagcgctatgccgacttcactctcctctccatcccgtatccaggctgtgaatttttcaaggaatataaagatcgggattacatggcagaagggctcatatttaactggaagcaggactacgttgatgccccattgagcatccccgacttcctgactcactctctgaacattgactggagccagtatcagtgttgggatctggtgcaacaaacacaaaactacctgaagctgctgctttccttagttaacagtgatgatgacagcgggctgctggtacactgtatctcaggctgggatcggacccccctcttcatctccctcctgcgcctttccttgtgggctgatgggctcatccacacgtccctgaagcccactgagatcctctacctcactgtggcctatgactggttcctcttcgggcacatgttggtagatcggctcagcaaaggggaggagattttcttcttctgcttcaattttttgaagcatattacctccgaggagttctctgctctgaagacccagaggaggaagagtttgccagcccgggatggaggcttcaccctggaagacatctgcatgctgagacgaaaggaccgtggcagcaccaccagccttggcagcgacttctccctggtcatggagagttccccaggagccactgggagcttcacctatgaggccgtggagctggtcccagcaggagcgccaactcaggcagcttggaggaagagccactcatcctctccacagagtgtcctctggaaccggccacaaccctcagaggaccgcttgccttcccagcaggggctggcggaagccaggtcttccagctcctcttcctcaaaccattctgataactttttcaggatgggtagcagtcccctggaggtccccaaacccagatcagtggaccatcccctgcccggatcctctctctccacagactatggcagctggcagatggtaacgggctgtggcagtattcaggagcgggctgtcctgcacacagactcctctctccctttcagcttcccggatgagctccctaacagttgtctgcttgcagccctgagtgatcgagagactcggctgcaggaggtgcgctcagccttcttggctgcgtacagcagcacagtggggcttcgggcagtagcccccagtccttccggtgccatcgggggcctgctggagcaatttgcccgtggtgttggactccggagcatcagcagcaatgccttgtgaagaagccagcccatgacatt

SEQ ID NO: 57 - DNA, 1304 bp, Homo sapiens
  CDS (769)..(1098)
tttcgtgcgaccctccgccacttacccaccccggctcaagcacgacccgtggatccacgtgctttttcttgtccaatgggagccggctcccgggcgcgaaggggcggggaggaaaggaacgactgtgctacgttgccagaaggggcgggacctgcaacgtccgacagaacgaggggacgtaacggaggcaggttggagccgctgccgtcgccatgacccgcggtaaccagcgtgagctcgcccgccagaagaatatgaaaaagcagagcgactcggttaagggaaagcgccgagatgacgggctttctgctgccgcccgcaagcagaggtagccccagggaggggagggaaagggacggtggagacctgggttagaccaagggttatagaaggaaagagagctacctcagggcttgaatgtggactagtcgtgaggagcagagtgcattgcttcctctagggttttatttcctccccaccctccaaattgttagctcacagccttacaggaaaggacgggggcgggcgcctgccctcagtctgatttctgagcgtccctgggtctgaccttaagggcaagggcagggagcttcacatttcaaatacagttgtggttacggcagcccagtacttttggccctccttgctgttcggttctcctcccttctcccaacctcctcactggtgttgctgggtgtggtcctcaatacagaatagagacccttgggcctgtgtcaccagacttctgaccccttgggcaacagccagatggagactggtcgccttttgagcctcagctctcttcctcttgttctcctagggtgggagtacagcagccaaacgctgaacttagtcccatccacttccatcttatcctttgtgcccttcatccccctgcatcttgtcctttttgccctctggtacctcccagtgccccatcatctctacccccagggactcggagatcatgcagcagaagcagaaaaaggcaaacgagaagaaggaggaacccaagtagctttgtggcttcgtgtccaaccctcttgcccttcgcctgtgtgcctggagccagtcccaccacgctcgcgtttcctcctgtagtgctcacaggtcccagcaccgatggcattccctttgccctgagtctgcagcgggtcccttttgtgcttccttcccctcaggtagcctctctccccctgggccactcccgggggtgagggggttaccccttcccagtgttttttattcctgtggggctcaccccaaagtattaaaagtagctttgtaattcaaaaaaaaaaaaa

SEQ ID NO: 58 - DNA, 728 bp, Homo sapiens
  CDS (299)..(418)
aataaaagtgagtagggtgcccataatccggaagtttctttgtttaggaaaataaaaacaaggaacttcatagacccccccaaaggggaattctatatcttgacaagtaaaattttagatggaaattatctacaacaccacacttacggaaattgctatcctcactctattatttgcaaaagggttatacacagtagcaccttctaactgaagtattaaacagagtttccattgctgtcgtattttgcttaattattatccttatagcagggataatagttactaacaaaaaggaagcatgaaagttttactatcactgagcctggtaggactttttattgggtttagtgatgcagttttaaatgaaacatgccgcttttggattaatacctctagtaaaggaaaatttacagatacttaaaaatcaaatcaaaattattgataggctcaggaaaaatgccagcttcagccctgagtggctacaaaccctctttaataaattccagtcttctttatggaattggttaacgcctttattaagccctctcttgcttatatgtcttgtattgatatttggactctgtatatacaatactataactcgaaattgttttttcttgcctagaaaccatccaactcccaatggtggtttaaaccggaccaaaaaaggaccagggcttttttcccaggaccctttaatttatcccaggggggaccctaactgttat

SEQ ID NO: 59 - DNA, 635 bp, Homo sapiens
  CDS (310)..(534)
gattttcttctctttctaaggctaatggtggtagttttgttttttgacgttttcttataatgagtttttctttataatttttaatttatgctgtaatgtttcttatttacaatgttatctcttaaatctttgagtacattacattttctcccctgataatctcttctaaattaccttctctagttggttttcttcccttccttaatgttagccattcttcaggtgaaggttaatcctcaatgtactcttcatgtttaaggggagggtctaaaaccttgtgggtaggacttaccaacggagtttcattgcatgatgatcttattgagcttattggtagcccttatctcagtatctttagtttttcttgggctggtcagattttcaagagaagacttttcatttcctttgtggagggaaaaggccttttaccagcactcttcaagctcagtaggggaaagacttcaagcactcaggaagcatgcattcactttatttggaacaatacccttacttgtaactgtgcctcaggtgccatagtccacagagacttcttttacctgtccagagaataaaattagttgtctgttggggtaacaaaaagtgtggagctgaagagggtacctataaatgaagtt

SEQ ID NO: 60 - DNA, 2167 bp, Homo sapiens
  CDS (54)..(1526)
ctgtggatttcttggctggggacaggccccgggcagtgcctgctgctgttttcatggtcctcctgagctccctgtgtttgctgctccccgacgaggacgcattgcccttcctgactctcgcctcagcacccagccaagatgggaaaactgaggctccaagaggggcctggaagatactgggactgttctattatgctgccctctactaccctctggctgcctgtgccacggctggccacacagctgcacacctgctcggcagcacgctgtcctgggcccaccttggggtccaggtctggcagagggcagagtgtccccaggtgcccaagatctacaagtactactccctgctggcctccctgcctctcctgctgggcctcggattcctgagcctttggtaccctgtgcagctggtgagaagcttcagccgtaggacaggagcaggctccaaggtggccctgctgctgctggtgggcgtggtacccactatccagaaggtgagggcaggggtcaccacggatgtctcctacctgctggccggctttggaatcgtgctctccgaggacaagcaggaggtggtggagctggtgaagcaccatctgtgggctctggaagtgtgctacatctcagccttggtcttgtcctgcttactcaccttcctggtcctgatgcgctcactggtgacacacaggaccaaccttcgagctctgcaccgaggagctgccctggacttgagtcccttgcatcggagtccccatccctcccgccaagccatattctgttggatgagcttcagtgcctaccagacagcctttatctgccttgggctcctggtgcagcagatcatcttcttcctgggaaccacggccctggccttcctggtgctcatgcctgtgctccatggcaggaacctcctgctcttccgttccctggagtcctcgtggcccttctggctgactttggccctggctgtgatcctgcagaacatggcagcccattgggtcttcctggagactcatgatggacacccacagctgaccaaccggcgagtgctctatgcagccacctttcttctcttccccctcaatgtgctggtgggtgccatggtggccacctggcgagtgctcctctctgccctctacaacgccatccaccttggccagatggacctcagcctgctgccaccgagagccgccactctcgaccccggctactacacgtaccgaaacttcttgaagattgaagtcagccagtcgcatccagccatgacagccttctgctccctgctcctgcaagcgcagagcctcctacccaggaccatggcagccccccaggacagcctcagaccaggggaggaagacgaagggatgcagctgctacagacaaaggactccatggccaagggagctaggcccggggccagccgcggcagggctcgctggggtctggcctacacgctgctgcacaacccaaccctgcaggtcttccgcaagacggccctgttgggtgccaatggtgcccagccctgagggcagggaaggtcaacccacctgcccatctgtgctgaggcatgttcctgcctaccatcctcctccctccccggctctcctcccagcatcacaccagccatgcagccagcaggtcctccggatcactgtggttgggtggaggtctgtctgcactgggagcctcaggagggctctgctccacccacttggctatgggagagccagcaggggttctggagaaagaaactggtgggttagggccttggtccaggagccagttgagccagggcagccacatccaggcgtctccctaccctggctctgccatcagccttgaagggcctcgatgaagccttctctggaaccactccagcccagctccacctcagccttggccttcacgctgtggaagcagccaaggcacttcctcaccccctcagcgccacggacctctctggggagtggccggaaagctcccgggcctctggcctgcagggcagcccaagtcatgactcagaccaggtcccacactgagctgcccacactcgagagccagatatttttgtagtttttatgcctttggctattatgaaagaggttagtgtgttccctgcaataaacttgttcctgagaaactgtcaaaaaaaaaaaaaaaaaaa

SEQ ID NO: 61 - DNA, 639 bp, Homo sapiens
  CDS (324)..(446)
cggcacgagctttggctcaacttacataatctttgttttgatatcacagttgtctaattattttactttgtagcttaaggcaggctgaattgttgataaaatggaaaaagtagtatattgttatataagcttctgaggtgtgttttgttgtataagccctggaggttaaaaagtcatcccttatgtatagtagttaaaggcataaaactgtgacttttagatattccacagaaccagacttatttgatgtggataataaccaatgatttagcattttgtttgcttttgttttattttatccgggttcattttttactcttcccatgtacatgaaacaggtggtggcgtgtagagatcagctgatccttgttttatggttaattgaactactttgtatccagggtttctgcaaatccaaaagtgatttttcatctaggatctattcctaacagtctactccaatcccactttagttttccacaattttaaatcttaatagtgagaattcaaatgaaagtcatttcatttgactattctgatgacatgattgtggcagaataaattgggtcttaaaatgccctagaaaatggtaaatgataaaaaataatattttaaaattcaaccaaagaaatggcccat

SEQ ID NO: 62 - DNA, 2728 bp, Homo sapiens
  CDS (194)..(2596)
aattaagcttgcaataaaagaggcagaaattcaaaagcttcatgcaaacctgactgcaaatcagttatctcagagtcttattacttgtaatgacagccaagaaagtagcaaattaagtagtttagaaacagaacctgtaaagctaggtggtcatcaagtagcagaaagcgtaaaagatcaaaatcaacatactatgaacaagcaatatgaaaaagagaggcaaagacttgttactggaatagaagaactacgtactaagctgatacaaatagaagctgaaaattctgatttgaaggttaacatggctcacagaactagtcagtttcagctgattcaagaggagctgctagagaaagcttcaaactccagcaaactggaaagtgaaatgacaaagaaatgttctcaacttttaactcttgagaaacagctggaagaaaagatagttgcttattcctctattgctgcaaaaaatgcagaactagaacaggagcttatggaaaagaatgaaaagataaggagtctagaaaccaatattaatacagagcatgagaaaatttgtttagcctttgaaaaagcaaagaaaattcacttggaacagcataaagaaatggaaaagcagattgaaagagttaggcaactagattcagcattggaaatttgtaaggaagaacttgtcttgcatttgaatcaattggaaggaaataaggaaaagtttgaaaaacagttaaagaagaaatctgaagaggtatattgtttacagaaagagctaaagataaaaaatcacagtcttcaagagacttctgagcaaaacgttattctacagcatactcttcagcaacagcagcaaatgttacaacaagagacaattagaaatggagagctagaagatactcaaactaaacttgaaaaacaggtgtcaaaactggaacaagaacttcaaaaacaaagggaaagttcagctgaaaagttgagaaaaatggaggagaaatgtgaatcagctgcacatgaagcagatttgaaaaggcaaaaagtgattgagcttactggcactgccaggcaagtaaagattgagatggatcagtacaaagaagagctgtctaaaatggaaaaggaaataatgcacctaaaacgagatggagaaaataaagcaatgcacctctctcaattagatatgatcttagatcagacaaagacagagctagaaaagaaaacaaatgctgtaaaggagttagaaaagttacagcacagtactgaaactgaactaacagaagccttgcaaaaacgggaagtacttgagactgaactacaaaatgctcatggagaattaaaaagtactttaagacaactccaggaattgagagatgtactacagaaggctcaattatcattagaggaaaaatacactactataaaggatctcacagctgaacttagagaatgcaagatggagattgaagacaaaaagcaggagctccttgaaatggatcaggcacttaaagagagaaattgggaactaaagcaaagagcagctcaggttacacatttggatatgactattcgtgagcacagaggagaaatggaacaaaaaataattaaattagaaggtactctggagaaatcagaattggaacttaaagaatgtaacaaacagatagaaagtctgaatgacaaattacaaaatgctaaagaacagcttcgagaaaaagagtttataatgctacaaaatgaacaggagataagtcaactgaaaaaagaaattgaaagaacacaacaaaggatgaaagaaatggagagtgttatgaaagagcaagaacagtacattgccactcagtacaaggaggccatagatttggggcaagaattgaggctgacccgggagcaggtgcagaactctcatacagaattggcagaggctcgtcatcagcaagtccaagcacagagagaaatagaaaggctctctagtgaactggaggatatgaagcaactctctaaagagaaattagagaaggcaaaattggaattagaagaagctcaggatactgtaagcaatttgcatcaacaagtccaagataggaatgaagtaattgaagctgcaaatgaagcattacttactaaagaatcagaattaaccagattacaggccaaaatttctggacatgaaaaggcagaagacatcaagtttctgccagccccatttacatctccaacagaaattatgcctgatgttcaagatccaaaatttgctaaatgttttcacacatctttttccaagtgtacaaaattacgtcgctctattagtgccagtgatcttactttcaaaattcatggtgatgaagatctttctgaagaattactacaggacttaaagaaaatgcaattagaacagccttcaacattagaagaaagccataagaatctgacttacacccagccagactcatttaaacctctcacatataacctagaagctgatagttctgagaataatgactttaacacgcttagtgggatgctaagatacataaacaaagaagtaagactattaaaaaagtcttctatgcaaacaggtgctggtttaaatcagggagaaaatgtgtaattcaaagaagatactgatgtgttgaaaaaatggaatttttggtactgtgctgtttacttattatatgtagctcatacttcatagaagctgttattttgcttttgaataaattttatatttcaatatttt

SEQ ID NO: 63 - DNA, 1633 bp, Homo sapiens
  CDS (489)..(803)
cggcacgagaaattaatattccttgggtctttcaaatgaatggttcaatgtgaggagcgaagtactgggaaatcgagggattttccacaatccccaagcagcttactcagtggaacctctgtttccccagctatgaaggaaatagcatcctacattccgtaaagtgcttgaagaagctctagctgagaatgctgaattttacagtcattgttttatggttacaagggtatgtcttcagggctctgttcattttccctcttgattttctcttttgaagatgccttgcccagtggcatggaaagaagcccacttgatgataggagcctgactatgaattgattgactaaacatgaccccaggtggaagctggctttgacaccagcttcctgttcagtctgaccactgctgtcctcctgctgcccaagagttgcacctggagcaaggaaccccaccatggctgtcgctctccatcccatcacgctagaatcatgtgtccaagggctcaccctggaggtgcacagcacaggtcagcctggccaggggcgaaggagacagtagagaggaagctcagggccttaggggaggccgggtgcaaacccgttctgcaccaagtgcactcggagtttgtgggtatgggtgtgtacccctgcaggtgtgcacatgtgtgcttgcacgcacatatttgtgcactcctgtgcgtatacatgtgtgcttgtgtatgcatatgtgtgcattcctgcatgtgtggacatgtgcgtgcatgcatctgtgtgtctgtgtgtgtgctgagacaggaaagggggtgaaagtgttggtgagggagcctggaagttttctcttccccaacctctcttgctctaaggagggatggggttgggggcagccattattgaaggtgatcggagaagaaagattttctgactcagaagtgactgccagtgtagcacaagcagtgtcccttgtgactgtgattctacagttctctgatcctcatgtttcctttagaggaaagaggaaaaaaggaactctgtggtgggtattgggagggaaaagaaaatagcctggtggaggcaggagggagtcgagtgtgagtaaggagcacctgcagcttttggaagtgaaagcagagagagggaaaggtagctaagacatccaggaggatcaaggggcagcgtgagaggcacagggggaggaaagggagagggtgagtggggccagggaagagaacggtgtggagttggtgggcagatggtgcaggaggagggctgggcagtggggagaggaagaatcagagcagagaaaccgctgctgcggaaggcagggagcaaagaagcataaggaaaagaacaggagaaagaacaaaggcagagaagacctcctcagctattttggtgctaggtaatgtgaaatgctgcagtaaataaaagccataagtaatgtttgattttacagtatttacaaaccatatgctttaaacagcccacaaactccatccagttgtctgatgatgtgggaggaccagctctagttagacggaggtatgtgattcgattctggtggagactttgtgccttgaaaggcttctcaggaaagcagtaataaaacaaagtgtccttgtttggcaaaaaaaaaa

SEQ ID NO: 64 - DNA, 944 bp, Homo sapiens
  CDS (434)..(718)
ttttttttttttatggtagctatttgattattttaattctttagcagcactgaagaaattcagagaagttcaatagagagtaatagctataaagggaagaagggtgatttgtcaaacttcagaatcaactttaaatgtaaaaacaaaaagatcattccaccaactcaggccaccttgttgagtgaagagagaaaacatttacagaacacctggaaagaccttcgggcctggagctgagaaatacgtggaagcctcactagaatgagttctttattggttcggtggacagccaggttactaaggagcactttttgttaaataagtgaccaaaatccccttgggccatctcctaaaatgatctttatcataatagctacagtaaaaagaaagaaggagaggtattaatgtgggtggaaatcaggacagtttcctaatgccgtggcttacaattctgagatttctccaggcatcaggacatgtgcgcgcacaggacttggctctcttaggagatacttcagtttgtatcagatgtggctgtggagggtgctctttaagcattgctaactatgagtgggtccctctcagaaggaaggactgtaagaggtatgaaacttctgagaaaacgagctgtcttctcttaccaagcgcctgcagccgtcaaaatgctgtaggctttagtcgtctgccagttcccaagctgagctgtctccttcatggataggatttgtttgtttagaaacaacaacaaagttcattctgtttataactcagagcatttgttttttctgctgaggctaaaatacttgtttattctttcctagaggagaaaagaaaaagagaacaattaaaaacaagaaaaacaaaactagatattctaaatttcacaagcgtttttcaaaaagagacgaggccatatttttccttaaagaaaattactttttttt

SEQ ID NO: 65 - DNA, 664 bp, Homo sapiens
  CDS (119)..(532)
atttatttgagatgaggaaaggaaattgagcagaaggtacaggagtaatagcaattccctgtagctctcaaagcaaattttgagctcatttttctttttctgcaagctcagcagcagaatgcccagagtcttccctggtagatgcaggttccatagcgacgtgctccttgctatagaagacctgggacagaggactgctgtctgccctctctggtcaccctgcctagctagaggatctgtgaccccagccatgaggaccctcgccatccttgctgccattctcctggtggccctgcaggcccaggctgagccactccaggcaagagctgatgaggttgctgcagccccggagcagattgcagcggacatcccagaagtggttgtttcccttgcatgggacgaaagcttggctccaaagcatccaggctcaaggaaaaacatggcctgctattgcagaataccagcgtgcattgcaggagaacgtcgctatggaacctgcatctaccagggaagactctgggcattctgctgctgagcttgcagaaaaagaaaaatgagctcaaaatttgctttgagagctacagggaattgctattactcctgtaccttctgctcaatttcctttcctcatcccaaataaatgccttgttacaagaaaaaaaaa

SEQ ID NO: 66 - DNA, 3016 bp, Homo sapiens
  CDS (8)..(2530)
tttcgtcatggcgcaagctctgtctgaggaggagtttcagcggatgcaggctcagctcctggaactccggacaaacaactaccagctttcagatgaactacgcaagaatggtgttgaactcaccagtcttcgacagaaggtcgcctacttggataaggagttcagcaaagctcagaaggcactgagcaagagcaagaaagctcaggaagtcgaggtattgctgagtgaaaatgagatgctgcaggcaaagctgcacagccaggaggaggacttccgtttgcagaacagcacactaatggccgagttcagcaagctctgcagccagatggaacagctggagcaagagaaccagcaactgaaggagggggctgcaggagcaggggttgcccaagctgggcccctcgtggatggggagctgctgaggctacaggctgaaaacacagccttgcagaagaacgtggcagccctgcaggaacgctatgggaaagaagccgggaagttctcagctgtcagtgagggccagggggatcccccagggggcccggcccccaccgtcctggcccccatgccgttggcagaggtggagctgaaatgggaaatggagaaagaggagaagagattgctctgggaacagctgcaaggcttagagagctcaaagcaggccgaaacatccaggctgcaggaggaacttgctaagctctccgagaaactggtagtgacctggcgtcgtttttgccgtctgcagacagaaaaggagactctgtttaatgacagcaggaacaagattgaggaattacaacaacggaaggaagctgatcacaaagcccagttggctcgaacccagaagctgcagcaggaacttgaggctgccaatcagagcttggcagagctgagagatcagcggcagggggagcgcctggaacatgcagcagctttgcgggccctacaagatcaggtatccatccagagtgcagatgcacaggaacaagtggaagggcttttggctgagaacaatgccttgaggactagcctggctgccctggagcagatccaaacagcaaagacccaagaactgaatatgctccgggaacagaccactgggctggcagctgagttgcagcagcagcaggctgagtacgaggaccttatgggacagaaagatgacctcaactcccagctccaggagtcattacgggccaatagtcgactgctggaacaacttcaagaaatagggcaggagaaggagcagttgacccaggaattacaggaggctcggaagagtgcggagaagcggaaggccatgctggatgagctagcaatggaaacgctgcaagagaagtcccagcacaaggaagagctgggagcagttcgtctacggcatgagaaggaggtgctgggggtgcgtgcccgctatgagcgtgagctccgagagctgcatgaagacaagaagcgtcaggaggaggagctccgtgggcagatccgggaggagaaggcccggacacgggagctggagactctccagcagacagtggaagaacttcaagctcaggtacattccatggatggagccaagggctggtttgaacggcgcttgaaggaagccgaggaatccctgcagcagcagcagcaggaacaagaggaagccctcaagcagtgtcgggagcagcacgctgccgagctgaagggcaaggaggaggagctacaggatgtacgggatcagctcgagcaggcccaggaggagcgggactgccacctgaagaccattagcagcctgaagcaggaggtgaaggacacagtggatgggcagaggatcctggagaagaagggcagtgctgcgctcaaggacctcaagcggcagctgcatttggagcggaaacgggcagataagctgcaggagcgactgcaggacatcctcactaacagcaagagccgctcaggccttgaggagctggttctctcagagatgaactcaccaagccggacccagacaggggacagcagtagcatctcctccttcagctaccgggagatcttgcgggaaaaggagagctcggctgttccagccaggtccttatccagcagccctcaagcccagccccctcggccagcagagctgtcagatgaggaagtggctgagctctttcagcggctggcagagacacagcaggagaaatggatgctggaggagaaggtgaagcacctggaagtgagcagtgcttccatggcagaggacctctgccggaagagcgccatcattgagacctacgtcatggacagccggatcgatgtgtctgtggcagcaggccacacagaccgcagcgggctgggcagcgtcctgagagacctagtgaagccaggcgacgagaaccttcgggagatgaacaagaagctgcagaacatgctggaggagcagctcaccaagaatatgcacttgcacaaggatatggaagttctgtcccaggaaattgtgcggctcagcaaggagtgcgtggggcctcctgacccagacctagagccaggagaaaccagctaaagacctgcaggctgcacccacctcctccccttcctaccccctaggatgctattcccttgggctgtggtggaaaaatgagggctggagccaaaatcaaatagcttgggagactggacattaaaggggctagaggcctgatggttagtgttaatgatcctgtcttagggcagaggccaccagggagtggggatcctgagggaaggggcagggatttctccttcttcttggtcctggctcccaagggcttctgtcttcatctctgcatgagctctccttcccagagaccaactcttttttattttattttattttattttttaatttatgtctggagcctggctactctgcatttgggattggggatgctgggtgggtgtgtggtccatgttcagcgttctagcaacacgtgtgtgtgtgtgtgtgtaaaggctatgcagccaaaataccatctggccagacgggcccacccacaaaaaaaaaaaa

SEQ ID NO: 67 - DNA, 5166 bp, Homo sapiens
  CDS (794)..(4495)
gggagcgaaccactgacccagggggccagcgggctgtaccaccggccctgcaacccggggggacgcgggggccgaagggctgaaccactgggcccggatggggctcacagagcggaacgctccacgagaatcgtgggggcgagggaaagggtcaagattaccagccattgaccaccctcccgggaagggccttagcctgggaagcacagcttctccgtcaagtttttcccgagctcccctcgcaatacaccaggaagctccgccccgtcggagactcaatcttcgcatctgcaaaatgggcgcaggggtgcaaatgggtggccgtggttgccggggctggggagatggcccacttgttccagccacggtcacctctcttctcagagtgaagttcccagaccctacgccccgctgtcaggcagcccgccgatcagatggaggagaacgaggtggagagcagcagcgacgcggcccctgggcctggccggcccgaggagccctctgagagcggcctgggtgtgggcacctcagaagccgtgtccgccgacagcagcgactgcctgctgtggcctgcccctgtgtggcatgtgcagaggccgatgactctggcgtggggcaaagctcggaccgcggcagccgttctcaggaggaggtatctgagagcagctcgagcgcagaccccctgcctaatagctacctccctgattcatcgtctgtgtctcatgggccagtggcaggggtgacaggcggtcccccagcacttgtgcactctagtgcactcccagaccccaacatgctggtgtccgactgcacagcttcctcctcggacctgggctcggccatcgacaagatcatcgagtccaccatcgggcccgacctcatccagaactgcatcactgtgaccagtgctgaggatggcggggccgagaccacacggtacctgatcctacagggcccagatgatggagcccccatgacatcaccaatgtccagttccaccttggcccacagcctagcagccattgaggccctggcagatggccccacatccacatccacatgcctggaggcacagggtgggcccagctccccggtgcagctgcccccagcctccggtgccgaagagccggacctgcagagcctggaggccatgatggaggtggtggtggtgcagcagttcaaatgcaagatgtgccagtaccggagcagcaccaaggccacactgctgcgccacatgcgggaacgccacttccgtccagtagcagcagccgcagcagcagctggtaaaaaaggacgtctacggaagtggagcacctccaccaagacccaagaggaagagggaccagaggaggaggacgatgatgacattgtagacgctggagccattgatgacctggaggaggatagcgactataatccagctgaggatgagccccgaggccggcagcttcggctccagcgccccacccccagtaccccaaggccccgaaggagacctggccggccccggaagctgccccgcctggagatctcagacctcccagatggtgtggaaggagagcctctagtgagttcccagagtggacagagccctccagagccacaggatcccgaggctcccagctcctcaggcccaggacacctggtggccatgggcaaggtgagcaggacccctgtggaagctggtgtgagccagtcagatgcagagaacgcagccccctcctgcccggatgagcatgacactctgccccggcgccgaggtcgaccttccaggcgcttcctaggcaagaaataccgcaagtactattacaagtcgcccaaaccacttttgaggcccttcctgtgccgcatctgtggttctcgctttctgtcccacgaggacctgcgcttccacgtcaactcccatgaggctggcgatccccagctcttcaagtgcctgcagtgcagctatcgttcccgccgctggtcctcgctcaaggagcacatgttcaaccacgtgggcagcaagccctacaagtgtgacgagtgcagctacaccagtgtctaccggaaggacgtcattcggcacgccgctgtgcacagccgggaccggaagaagaggccagatccgactccaaagctgagctctttcccctgccctgtgtgtggccgtgtgtaccccatgcagaaaagactcacgcagcacatgaagacgcacagcactgagaagccccacatgtgtgacaagtgtggaaagtcctttaagaagcgctacaccttcaaaatgcacctgctcacgcacatccaggctgttgccaaccgcaggttcaagtgtgagttctgtgagtttgtttgtgaagacaagaaggcactgctgaaccaccagttgtcccacgtcagtgacaagcccttcaaatgcagcttttgtccctaccgcaccttccgagaggacttcttgctgtcccatgtggctgtcaagcacacaggggccaagcccttcgcctgtgagtactgccacttcagcacacggcacaagaagaacctgcgcctgcacgtacggtgccgacacgcaagcagcttcgaggaatgggggaggcgccaccctgaggagcccccctcccgccgtcgccccttcttctctctgcagcagattgaggagctgaagcagcagcacagtgcggcccctggaccacctcccagttccccaggacctcctgagatacccccagaggcgacaactttccagtcatctgaggctccctcattgctctgttctgacaccctgggcagcgccaccatcatctaccagcaaggagctgaggagtcgacagcgatggccacgcagacagccttggatcttctgctgaacatgagtgctcagcgggaactggggggcacagccctgcaggtggctgtggtgaagtcggaagatgtggaagcagggttagcatcccctggtgggcagccctcccctgaaggtgccactccacaggtggtcaccctccacgtggcagagccagggggcggtgcagcagccgagagccagctaggccctcctgacctaccgcagatcaccctggcacctggtccatttggtgggactggctacagtgtcatcacagcaccccctatggaggagggaacatcagctcctggcacaccttacagcgaggagcccgcaggagaggcagcccaggctgtggttgtgagtgacaccctaaaagaagctggcacccactacatcatggctactgatggtacccagttgcaccacattgagctcaccgcagatggctccatctccttcccaagtccagatgctctggcctctggtgccaaatggcccctgctgcagtgtgggggactgcccagagacggccctgagcccccatctccagccaagacccactgcgtaggggactcccagagctctgcctcctcacctcctgcaaccagcaaagccctgggcctggcagtgcccccgtcaccgccatctgcagccactgctgcatcaaagaagttttcctgcaagatctgtgccgaggccttccctggccgagctgagatggagagtcacaagcgggcccacgctgggcctggtgccttcaagtgccccgactgccccttcagtgcccgccagtggcccgaggtccgggcgcacatggcacagcactcaagcctacggccccaccagtgtagccagtgcagctttgcctccaagaacaagaaggacctgcgtcggcacatgctgactcacacaaaggagaagccttttgcatgccacctctgcgggcagcgtttcaaccgtaacgggcacctcaagttccacatccagcggctgcacagtcctgatgggaggaagtcaggaacccctacagcccgggcccctacccagaccccaacccagaccatcatcctgaacagtgatgacgaaacactggccaccctgcacagtgagctgcccctggggccacaggctgcactccagtccagtcacggggtcctgggcccagagcggctacagcaggcactgagccaggaacacatcatcgttgcccaggaacagacagtgaccaatcaggaggaagccgcctacatccaagagatcaccacggcagatggccagaccgtacagcacctggtgacctccgacaaccaggtgcagtatatcatctcccaggatggtgtccagcacctgctcccccaggaatatgttgtggtccctgaaggccatcacatccaggtacaggagggccagatcacacacatccagtatgaacaaggagccccgttccttcaggagtcccagatccagtatgtgcctgtgtccccaggccagcagcttgtcacacaggctcaacttgaggctgcagcacactcagctgtcacagcagtggctgatgctgccatggcccaagcccagggcctgtttggtacagacgagacagtgcccgaacacattcaacagctgcagcaccagggcatcgagtacgacgtcatcaccctggccgatgactgagccccgagggcccaacacagatcatggatttgcggccagctctcctgggggtagggggccaccaggactcacctccctcttcatttaggatctccagatactggatagccagcatcctctcattcccagggagccagacctgtgctgttggggttaggggcagccatgggccccagccaggacatgctgggtgccccagcctgcaggcaggctttgggagagaaatttatttttgtttgggtggacccactggcctgtcagtctcaataaagggaccggagtccagtcctgaacagcttactttgtctgcttgctgctgtagcctgtaccaggccaggtcttgtgaggtggaggctgcctggctccacagcgtgccctgtcctgccctgcccctgttaagtccggtgatccaccagcagggcagacccttgctgcagaggcctggcaatgagagaggtggctggttcagagacggctgaaccagcgagaccccagcaagcaccttcagaccttcttcctccctgggccctagggagcacacgctctgtgcctacagaatctctgaagctgatctcctgagccttgactgtgaggcacaccagcttcttcgctaatgttggggatcaagggcaacaaaagtcttgctttttgggttgggacaggcacac

SEQ ID NO: 68 - DNA, 772 bp, Homo sapiens
  CDS (103)..(255)
tttcgtggcagcttactgtgtgtttgctggagctttcactcagccaagtgttagagtcaggaaacccattgaggcaatggcgtcaaatggtgtttcacaagaatgagccattcagtctttgctcactatatatttaatattttattattgttgttattgttattattaattggctttctgtattctatgccttttatttataaagacactaagaaaacccatgtttgtaattttaataacatttttcccatcttgtaatatccagagctactttataaattctctgaaccaaaagtattttcctcagtgtatctcttctcccccagcccctattgggaaaaattacccagtatagttcaggttatgaggaggatcagccacacaatccagtgcttcagtttgaaaatgtaaaattctaaccctaaagtagggttggttgaaatttcagacaaagcaaacccagcaggtataaaaagtagtataaatacaaatctgtaaattatttttgaattttctgaacttttttctaagagattacataggagactaaagaaatctatctgttcaagttctaattaggatgattgttaatactgcactgtggatgaagtggcgactggcttgtgtgctgacttctgtggtttagcaagaggtttattgttatcaaatgctaattggtaatgccaagtcactgggaccaattttctgttttataatatctaagtttagaacagaatatatacctgaactgtagtggtttgatcggacgaaa

SEQ ID NO: 69 - DNA, 1241 bp, Homo sapiens
  CDS (521)..(727)
tcgtctttacgtttaaatgtatatcatgtgtctaaagttgctttaagttaccataaattgaaacttcggaatctttggatgtattagctgatgttttgatgtatttttccaatgccagaataatttttaagtgctttgagaaaggaaggcattgatggagaggggaggaaaataacccaacccagttatctatccatattagatacacgtgtacacacacaatatgcaatacacaacatctctctgtaaaagtacccttttcagacaaagaaaggaaggtaatttgttcatcaattttgttttcttttgaaattcaatccaatctggaagtggcataggtaaataataatattcttccttttctcttcctgtagggtgctggagatctagaagacccatggtagccttaaaaaccttctaaaatgcttttgattctgaaaattgggggaaaaaacttttaatcacaattttcttcaatacaaggggaaaatattcttgcggattcccaacgttttgtgatatgagcagaaaatcattagcatttcccatcatttgttcatatttgtgttttctgacagttgccacttgtagcattgcctgtactacagtattttttgccaacctcaggcatactcgttacatctgtattgaactttcggccctagaaaccagtggagttatttcaccacaaatcaacaatgtgcctgaggtgcatgggaaatatagttagctatactctgaaaatacattatgttttttttctttaaacaaaacacacaacatgtaagcatgtaagagtaaagaattgtatgatatgttccttttttcagttcaccaagttggaagccttttgcagctctgtggcttggaatttcatttgagcaatttctataggatatgtatttattattgattgttatttaatttttttccaattttacctgtattaccaaactgggttctccaataatgtccaaattgtaatgttgccttgcttcaagataaagtgtatttgggaataatattataaacccttacaaattttatgcatgtatctactgcatccttcaactctcactagaaaatcttttgaaaccaaatggattaatttatggctatttataatttgctttgacatctcactgttggaaattttttaaagatgagatttgcctttataatgtaaattgtgatttttgttttacatgtgggtttctatagctttaattttttcagctttt

SEQ ID NO: 70 - DNA, 1311 bp, Homo sapiens
  CDS (95)..(757)
gcaagaagcttggaagcggagtgttgcaacagtgcatcccgacagcagcaacctgatccccaagctttttcgacctgcagcgttcctgcctttcatggcgcccacggtatttttgtcaatgacgccactgaaagggatcaagtccgtgattttacctcaggttttcctctgtgcctacatggcagcgttcaacagcatcaatggaaacagaagttacacttgtaagccactagaaagatcattactaatggcgggagccgttgcttcttcaactttcttaggagtaatccctcagtttgtccagatgaagtatggcctgactggcccttggattaaaagactcttacctgtgatcttcctcgtgcaagccagtggaatgaatgtctacatgtcccgaagtcttgaatccattaaggggattgcggtcatggacaaggaaggcaatgtcctgggtcattccagaattgctgggacaaaggctgttagagaaacgctagcatccagaatagtgctgtttgggacctcagctctgattcctgaagtcttcacctacttttttaaaaggacccagtatttcaggaaaaacccagggtcattgtggattttgaaactgtcttgtactgtcctggcaatgggactgatggtgccattttcttttagtatatttccacagattggacagatacagtactgtagtcttgaagagaaaattcagtctccaacagaagaaacagaaatcttttatcacagaggggtgtaggcgtgagttttaggtgaatttatgtggttcctgcttgaaaaccttcccctctccaggttcggtttagagaactttgccacaggtcttctggggtttttaaggctggctggagaagacagtgggagggtgccccgtctgacacccctggggttgctgagggaacggttggagtggggatcggcctgcgaaaggatactgtgaaatcactaattaactaataaacctgtctcaagttgaggatttgaagaaagaacacagagtccaccgtgcccaggacacaggtgttaaatggataggccgtctcaagcggaacacgtacccctggggcgctgtttacgccctccgaccccaaaagcaatcttgtttccttactcagtgtcctccattctagacagctacttaaaacctttgccgccctccgcccagtgcctcctttctcctctctggcaaaggaccctgcctcctccgccaggaaacaggtcagcagtggagccccccacacccgcacccgtactgtattgcggccgctctggaggatccacgcaacgtgg

SEQ ID NO: 71 - DNA, 943 bp, Homo sapiens
  CDS (667)..(798)
caacatcttcatgccccaggagcccaagtttggagatctttgtttcattctcaaaggacagctctacttatccttccaatgatcactgccaagttctctttagccatgggatacaggcgcagatttattatatgaatatattacgtagtggcaaagtccaggcttttaaggggaagattatatctttttttttctctcacagacatgattgggaaggtgtttatttttcctaaagaatctaatagtgctcacgtgagcttgatcacacagctggagaaatctacagaacttcactgcgtgtcttcatgcttataccgacctctcccatggctatcgcctcttctcctacagcatccagaccaagagcaatgagatggtcatttttaagtctcaaattggggagtacaatcttatcattgggggtgacaaggttttcttcaaggtctgtgagaatttccccaccctggtgcacatctatgccagctgggagtcctcctcaggcattgctgagttctgggtcagtgagaagccttaggtgaggatggggctaaggcagggtttctctgtgggagcttaccccaagattgccctgggtagcagcagggttcctatggaggcaagtttggtaagagccagtccattgtgggagagattggagatgtgtacatgtgggactctgtgctgtccccagaagaaatctggtttgtgtatcaaggtatctacatcaaacccaatattctggactggcgggcattgaactatacaatgcaaggttatgtggtcacccagtcccataaatagagttgaagttctgcttcaacaggacaaagttactgggaaggaaatccccaacatgaaagaccagctctgaagacaattctacttcatgccttatgtctatttctctgttttctctgaatttcctatctattgaactgcttaa

SEQ ID NO: 72 - DNA, 602 bp, Homo sapiens
  CDS (155)..(418)
cccagagctgaggcaaggggatttctcaggtcatttggagaacaagtgctttagtagtagtttaaagtagtaactgctactgtatttagtggggtggaattcagaagaaatttgaagaccagatcatgggtggtctgcatgtgaatgaacaggaatgagccggacagcctggctgtcattgctttcttcctccccatttggacccttctctgcccttacatttttgtttctccatctaccaccatccaccagtctatttattaacttagcaagaggacaagtaaagggccctcttggcttgattttgcttctttctttctgtggaggatatactaagtgcgactttgccctatcctatttggaaatccctaacagaattgagttttctattaaggatccaaaaagaaaaacaaaatgctaatgaagccatcagtcaagggtcacatgccaataaacaataaattttccagaagaaatgaaatccaactagacaaataaagtagagcttatgaaatggttcagtaaagatgagtttggttgtttttgttttgttttgttttgtttttttaagtcggggctcgctctgtccacccgggtggttt

SEQ ID NO: 73 - DNA, 1177 bp, Homo sapiens
  CDS (1)..(903)
atgcacaaagactgggtggtctttgatgtgtctggagaacacaaagaaggtgctcatgtctatgaggagagacaccaagtgtccgtctctcgaacagatgatgtgggctgcgtggtgccgtccgagtgcctgcgggcctgcggggccgaggtcggctgctccaacatcgcctaccccaagctggtcatggaactgatgcccatcggtctgcgggggctgatgatcgcagtgatgctggcggcgctcatgtcgtcgctgacctccatcttcaacagcagcagcaccctcttcactatggacatctggaggcggctgcgtccccgctccggcgagcgggagctcctgctggtgggacggctggtcatagtggcactcatcggcgtgagtgtggcctggatccccgtcctgcaggactccaacagcgggcaactcttcatctacatgcagtcagtgaccagctccctggccccaccagtgactgcagtctttgtcctgggcgtcttctggcgacgtgccaacgagcagggggccttctggggcctgatagcagggctggtggtgggggccacgaggctggtcctggaattcctgaacccagccccaccgtgcggagagccagacacgcggccagccgtcctggggagcatccactacctgcacttcgctgtcgccctctttgcactcagtggtgctgttgtggtggctggaagcctgctgaccccacccccacagagtgtccagattgagaaccttacctggtggaccctggctcaggatgtgcccttgggaactaaagcaggtgatggccaaacaccccagaaacacgccttctgggcccgtgtctgtggcttcaatgccatcctcctcatgtgtgtcaacatattcttttatgcctacttcgcctgacactgccatcctggacagaaaggcaggagctctgagtcctcaggtccacccattacctcatggggatcccgaagccccaagaggggcagattcccctcacagctgcacagcagctcggtgcccaagaactggccaagccagcaaagcgggagccctgaaaaattaggggggaaatgggagaaaataatgtgacatttcaaaaacagcaccaaagcagtcagcattggaaggaaaattagatttctgacggacaaaaaaaaaaaaaaaaaaa

SEQ ID NO: 74 - DNA, 983 bp, Homo sapiens
  CDS (199)..(927)
ctactatacggctgcgagaagacgacagaaggggaggatgaggcaccgttccaggagaaagattccggcagcgatgaagatttcctaatggaagatgatgacgatagtgactatggcagttcgaaaaagaaaaacaaaaagatggttaagaagtcgtggtctttggcttctcgactcggtcctgtttcgacagcgaacatgtcgcggcctgtcagaaataggaaggttgttgattactcacagtttcaggaatctgatgatgcagatgaagattatggaagagattcgggccctcccactaagaaaattcgatcatctccccgagaagctaaaaataagaggcgatctggaaagaattcacaggaagatagtgaggactcagaagacaaagatgtgaagaccaagaaggatgattctcactcagcagaggatagtgaagatgaaaaagaagatcataaaaatgtgcgccaacaacggcaggcggcatctaaagcagcttctaaacagagagagatgctcatggaagatgtgggcagtgaggaagaacaagaagaggaggatgaggcaccattccaggagaaagattccggcagcgatgaagatttcctaatggaagatgatgacgatagtgactatggcagttcgaaaaagaaaaacaaaaagatggttaagaagtccaaacctgaaagaaaagaaaagaaaatgcccaaacccagactaaaggctacagtgacgccaagtccagtgaaaggcaaagggaaagtgggtcgccccacagcttcaaaggcatcaaaggaaaagactccttctcccaaagaagaagatgaggaaccggaaagcccgccagaaaagaaaacatctacaagccccccacccgagaaatctggggatgaagggtctgaagatgaagccccttctggggaggattaaaagtgatgatggtctggggagagattttattaaaaaaaaaaagaaaaaaaaaa

SEQ ID NO: 75 - DNA, 2253 bp, Homo sapiens
  CDS (1)..(1938)
atgcgggctccgggtgcgggcgcggcctcggtggtctcgctggcgctgttgtggctgctggggctgccgtggacctggagcgcggcagcggcgctcggcgtgtacgtgggcagcggcggctggcgcttcctgcgcatcgtctgcaagaccgcgaggcgagacctcttcggtctctctgtgctgatccgcgtgcgcctggagctgcggcggcaccagcgtgccggccacaccatcccgcgcatctttcaggcggtagtgcagcgacagcccgagcgcctggcgctggtggatgccgggaccggcgagtgctggacctttgcgcagctggacgcctactccaatgcggtagccaacctcttccgccagctgggcttcgcgccgggcgacgtggtggccatcttcctggagggccggccggagttcgtggggctgtggctgggcctggccaaggcgggcatggaggccgcgctgctcaacgtgaacctgcggcgcgagcccctggccttctgcctgggcacctcgggcgctaaggccctgatctttggaggagaaatggtggcggcggtggccgaagtgagcgggcatctggggaaaagtttgatcaagttctgctctggagacttggggcccgagggcatcttgccggacacccacctcctggacccgctgctgaaggaggcctctactgcccccttggcacagatccccagcaagggcatggacgatcgtcttttctacatctacacgtcggggaccaccgggctgcccaaggctgccattgtcgtgcacagcaggtactaccgcatggcagccttcggccaccacgcctaccgcatgcaggcggctgacgtgctctatgactgcctgcccctgtaccactcggcaggaaacatcatcggcgtggggcagtgtctcatctatgggctgacagtcgtcctccgcaagaaattctcggccagccgcttctgggacgactgcatcaagtacaactgcacggtggttcagtacatcggggagatctgccgctacctgctgaagcagccggtgcgcgaggcggagaggcgacaccgcgtgcgcctggcggtggggaacgggctgcgtcctgccatctgggaggagttcacggagcgcttcggcgtacgccaaatcggggagttctacggcgccaccgagtgcaactgcagcattgccaacatggacggcaaggtcggctcctgtggtttcaacagccgcatcctgccccacgtgtaccccatccggctggtgaaggtcaatgaggacacaatggagctgctgcgggatgcccagggcctctgcatcccctgccaggccggggagcctggcctccttgtgggtcagatcaaccaacaggacccgctgcgccgcttcgatggctatgtcagcgagagcgccaccagcaagaagatcgcccacagcgtcttcagcaagggcgacagcgcctacctctcaggtgacgtgctagtgatggatgagctgggctacatgtacttccgggaccgtagcggggacaccttccgctggcgaggggagaacgtctccaccaccgaggtggagggcgtgctgagccgcctgctgggccagacagacgtggccgtctatggggtggctgttccaggagtggagggtaaggcagggatggcggccgtcgcagacccccacagcctgctggaccccaacgcgatataccaggagctgcagaaggtgctggcaccctatgcccggcccatcttcctgcgcctcctgccccaggtggacaccacaggcaccttcaagatccagaagacgaggctgcagcgagagggctttgacccacgccagacctcagaccggctcttcttcctggacctgaagcagggccactacctgcccttaaatgaggcagtctacactcgcatctgctcgggcgccttcgccctctgaagctgttcctctactggccacaaactctgggcctggtgggagaggccagcttgagccagacagcgctgcccaggggtggccgcctagtacacacccacctggccgagctgtacctggcacggcccatcctggactgagaaactggaacctcagaggaacccgtgcctctctgctgccttggtgcccctgtgtctgcctcctctccctgcttttcagcctctgtctccttccatccctgtccctgtctggccttaactcttccctctttttcttttctttctttctttcttttttttttaagatagagtctcc

SEQ ID NO: 76 - DNA, 1203 bp, Homo sapiens
  CDS (35)..(238)
  misc_feature (1)...(1203): n = a,t,c or g
ggcttgcggctcgggtggctgagcgcgcggggaaatggccacggggacagaccaggtggtgggactcggcctcgtcgccgttagcctgatcatcttcacctactacaccgcctgggtgattctcttggtatgtcattctccccgtccgctgctcaccttccccgagccctggcaccgccagagcaactactatataggctctaggcacggcgctggcttcattgcctgcctcatctcttgaactctccagaacaactctatgaggaagatgccagtggtaccgcattttatagatgagatagctgaggctaggggagaaggatctggcccaagattgcatccttagccgctacacttataactctgtttccggcttgctttgacttttgggggagttctgttccttctgggttagcctgctgactcttaggcatggcaaacgccagtgatatttgtgaaggcctttaggatatttttttcttgtgggaaaacttgttggttattgcttaagaagtgcagtgtgtctggaagtgcagaacttggtatcctttagagaaaaaatattagtgaagaagccctggaggcccaggttgggagtcagtcgaggattcctcaagtaccatttgctaggctgtgaggtgccttagggcagggtctcttggtgccctgttctcttgtccccaccaccaacctattgcaggcaccaaagcacgtgcccgggaaatacccatttgaaaattaaggaaagaaaccaaccccgaccccccaagcccgaatcttaaagaaaacaaatgcggccccagcctctgaatgggcaaccccttatatggaagaagtggaccctatctctaggggctcggaaagcaagagagccacaaagtcttcctcagccgccttccggccagacgggtattagacaattgcctccaacttgctcccatgccgggtgggccctcgcaaccgttgggcgggattcccaagagcgcccctgaaggccaaatctcggggcccggaaagtgttagcccatttttctggggtcggtggggggagagaaggcccnatggagctttgagcggcaatgcaccgggtagcccctctccgactagagggggttctgcgtttggtgtgcgcgcgtgacatggggggcgtcccccgggcgtgaggaggaggacgntacagtctccggcccggtgcgcgaccct

SEQ ID NO: 77 - DNA, 914 bp, Homo sapiens
  CDS (532)..(657)
cggagccccgagcccgcccggcagagcaagcgcggggaaccaaggagacgctcctggcactgcagataacttgtctgcatttcaagaacaacctaccagagaccttacctgtcaccttggctctcccacccaatggagatggctctaatggtggcacaaaccaggaaggggaaatctgtggtttaaattctttatgcctcatcctctgagtgctgaaggcttgctgtaggctgtatgctgttaatgctaatcgtgataggggtttttgcctccaactgactcctacatattagcattaacagtgtatgatgcctgttactagcattcacatggaacaaattgctgccgtgggaggatgacaaagaagcatgagtcaccctgctggataaacttagacttcaggctttatcatttttcaatctgttaatcataatctggtcactgggatgttcaaccttaaactaagttttgaaagtaaggttatttaaaagatttatcagtagtatcctaaatgcaaacattttcatttaaatgtcaagcccatgtttgtttttatcattaacagaaaatatattcatgtcattcttaattgcaggttttggcttgttcattataatgttcataaacacctttgattcaactgttagaaatgtgggctaaacacaaatttctataatatttttgtagttaaaaattagaaggactactaacctccagttatatcatggattgtctggcaacgttttttaaaagatttagaaactggtactttccccccaggtaacgattttctgttcaggcaacttcagtttaaaattaatacttttatttgactcttaaggggaactgaaggctatgagctgaattttttaatgaatattttacaggtagccgggtaatacatctgacgctag

SEQ ID NO: 78 - DNA, 947 bp, Homo sapiens
  CDS (626)..(790)
gtgccgtaattcattcatctctcagagatatgagtgattcacatgattcacagtcaaacaaaaaagccaccaagcagtatcccactgtgatccctcctcagctggtctgaaaaatacgaattgataaagtatttcatttgaaaacctgatcttgcatgttaaggggctgatgacgaaaattgtaatcaatttcctctttgtttctgtgcttagtttgacaagtgatgggtgaattgagggtagttttttgtcctttttaataaaaaaggacaaaaataatgtgatatttctaacatttttctacccaagtgttgggtatatcatagattagttaaaactcaatcaggaagctcagagaaaatgatttttctctgtttggaaacaaaggaggcacagagcatggatagagataactcattgcacagtgttcagtgagcagaatatgaccatcctagcagcaaggcttctgtgacttcctcagaagataaaacatgctccagtactttacagcctgttatcttgtcatcattgaccccgtttctctcctcactgctattctttaaccaaaggaaagagctcctgagagagacttgaaagtaatggttggaagggtggtttcagtgtaatggatacattctttttctcagaggccaatcccaggcattgtgaaagaaatggcttttcttatgaagacttcaaattttcccaactcttttcacaggtgttggggatgtcctttgcactgaccctgaactgccagattgacaaaaccagccagaccatagggctatgatctgcagtagtcctgtggtgaagagacttgtttcatctccggaaatgcaaaaccatttatagcatgaagccctacatgatcactgcaggatgatcctcctcccatcccttccctttttgaggccctggtctatacaaccagagaagtgggtgtg

SEQ ID NO: 79 - DNA, 835 bp, Homo sapiens
  CDS (361)..(480)
  misc_feature (1)...(835): n = a,t,c or g
cggctgtgngattcggcacgagaaatgggcctcttctggcatctcatgctactctgtgcttttccttgggctccaaattctagctcataaagatgcaagttttgcaatttcctataaatggttaagaaaagagcaagctgtccagagagtgagaagtttgaaaagagaggtgcataagagagaaatgatgtccatttgagccccaccacggaggttatgtggtcccaaaaggaatgatggccaagcaattaatttttcctcctagttcttagcttgcttctgcattgattggctttacacaactggcatttagtctgcattacacaaatagacactaatttatttggaacaagcagcaaaatgagaactttatttggtgcagtcagggctccatttagttccctcactctgcttctaatcaccccttctcccagccctcttctatttgatagaggtctgtccctcagatcagcaatgtcttagcccctctcctctcttccattccttcctgttggtactcatttcttctaacttttaataaacatttaggtataatacattacagtaagtgctatttagatacaaacttaaaacatactatatattttaaggatctaagaatcctttagagaaggcacatgactgaagtacctcagctgcgcagcctgtagccagtttttttaatgtaaaagtaagaatgccagccttaacctagccctgcagataaaagctaacttttattaataccagccctgaataatggcactaatccacactcttccttagagtgatgctggaaaaataaaatcaggggcttcagattaaaaaaaaaaaa

SEQ ID NO: 80 - DNA, 990 bp, Homo sapiens
  CDS (124)..(930)
tttcgtggggtctcctggccccttgacgcgtcaggttgctgtacccctgcattggatgcgctgtaccctgcgctggctccgtgaaccttagggacaacaccgggacacccgcgaggccggaaaatggactcagtggcttttgaggatgtgtctgtgagcttcagccaggaggagtgggctctgctggctccttcacagaagaaactctacagagatgtgatgcaggaaacattcaagaacctggcatctataggggaaaaatgggaagacccgaatgttgaagatcaacacaaaaaccaaggacgaaatctaagaagccatacgggagagagactctgtgaaggtaaagaaggtagtcaatgtgcagaaaacttcagtcccaatctcagtgtgacgaagaagactgccggagtaaaaccatatgagtgtactatctgtggaaaagccttcatgcgtctctcatcccttactagacacatgaggtctcacactggatacgagctatttgagaagccatataaatgtaaggagtgtgagaaagcctttagttatctcaaatcctttcaaagacatgaaaggagtcacactggagaaaaaccctataaatgtaaacaatgtggaaaaaccttcatatatcaccagccctttcaaagacatgagcggactcacattggagaaaaaccctatgaatgtaagcaatgtggaaaagctcttagttgttccagttcgcttcgagttcatgaaaggattcacactggagaaaagccctatgaatgtaaacaatgtgggaaagccttcagttgttccagttctattcgagtacacgaaagaactcacactggagagaaaccctatgcatgtaagggaatgtgggaaagccttcatttcccacacaagtgttcttacacacatgataacacacaacggagatagaccttataaatgcaaagaatgtggaaaggcattcatttttcccagttttttacgagt

SEQ ID NO: 81 - DNA, 1270 bp, Homo sapiens
  CDS (63)..(1124)
ccctccctcatcaccagcagtgaaaatctagagctggagctcagcctctgggaaggcccagcatggaggcagccacagctccggaggtggccgcaggatccaagctgaaggtgaaagaagccagcccagcggatgctgaaccaccccaggcttcacctggacagggggctggcagccccactccccagctcctgccccctatagaagagcaccccaagatctggctacctcgggccctgaggcagacctacatccggaaggttggggacacagtgaacctactaatcccattccagggcaagcccaaacctcaagccatctggacacatgatggctgtgccttggacaccaggcgtgtgagtgtgcggaatggggagcaagactccatcctcttcatccgagaagcccaacgtgctgactcaggtcgctaccaactccgcgtgcagctgggtgggctggaggccaccgccaccattgacatcctggtgattgagaggccaggccctcctcagagtattaagctggtggacgtttggggcttcagcgctacactggaatggacaccgccccaagatacggggaatacagcacttctgggatacacggtgcagaaggctgacacaaaatccgggctgtggttcacggtgctggagcactatcaccgcaccagctgcatcgtctctgacctcatcatcggcaactcctatgccttccgtgtctttgctgaaaaccagtgcggactcagtgaaacagcccccatcaccacggacctcgcccacatccagaaagcagctactgtttacaagaccaaggggtttgcccaacgagacttctctgaagccccaaagtttacccagcctctggccaactgcactacagtcaccggctataatacccagctcttctgctgtgtccgcgcctctccccggcccaagatcatctggctgaagaacaagatggatatccaaggcaaccctaagtacagagccctgactcacctgggaatctgctccctagagatccgcaagccgggtccctttgatggaggcatctatacctgcaaggcggtgaaccccctaggggaggcatctgtggactgtcgggtggatgtgaaagttcctaattgaggacacctaagaaggcatcgtactctgacaaagtgcctccaggaagcccgccagtggtgagactgtgtcctcaaggagcttcggcaccatgtctggtttggattcatctaaataaatatgtggttccccagtgaaaaaaaaaa

SEQ ID NO: 82 - DNA, 968 bp, Homo sapiens
  CDS (763)..(924)
taaggctctaagttaactgctgttagttggaaatattatttttgattttttatacccatagttgtatagttatattctgaacccaccattgttaaattacattctattaaagagaaagagaggaaaaagaaaacttccgaacccaccattgtaaaattacattccattaaagagaaagagaggaaaaagaaacttagtttgctttctgggggattgttgaggtaagacgcctcttagatactgttcttatattctcttcatgtctagattgtagaaattattaaaaatagctatttagggctatactgagggagcggaaatattcttggttaaagtctgtttatcggcaagagcatttggggatgaaggaaataattccttcctatgaatttgctaggtttctggggattggattcaaagagcagaagtatgatgccaggggctggtaaggactcagccatatagagatttcagctgcattataatgtatatttgagaaattgagttcttattatcagaaaattgacctatgtaatgaaatactagaagaaaactctaaattagaatggctttgttatgaatttttaatgataagtactaacacttaaaagggaaaaaatttttcaaagaaaatgcctaaaaatgtgttgtatctgagatcatcatatatgtagtattacagtgcaaacactattaatgttaatgaggtaggtggatttttttaatgaaaaaacttgaaatattatcaggttgtccccatttatggaatttaagcttgtcagaaagatccagatagctatattaatattttatctgtatttggttgcggttgcttttaaaaataagttttcttataagtcatttcaattttttggtttagagtccatatttcaaaataaaaagttaaaaaaagagtaccttatgtaatttagcaaggtattccataaactcagggaggaaaaaaaaaa

SEQ ID NO: 83 - DNA, 1749 bp, Homo sapiens
  CDS (279)..(1475)
tttcgtcaatatggcgtcctccacataggcagtggctgtggtttctaccccgggtggccgggggcagtgctgagctgggactgttgtttgcccagcctgggctgcagaaagcagcagttaaagttcgtttctggtcactgctccaggaagccaccttactctgagggtcaagaattgccgcttccttttagttactgtaagttcctcctctgcccctggtttgtttcccgcggcacttctggatacccccaggtcccagacccttccagactcaaaccatgaactttcggcagctgctgttgcacttgccacgttatcttggagcctcgggttccccgcgtcgcctgtggtggtccccgtccctcgacaccatctcctcggtgggctcttggcgtggtcggtcctccaagtccccggcccactggaatcaggtagtgtcagaggcggagaagatcgtggggtaccccacgtccttcatgagccttcgctgcctgctgagcgacgagctcagcaacatcgctatgcaggtgcggaagctggtgggcactcagcaccctctgcttaccacagccagggggcttgtacatgacagctggaatagcctccagttgaggggcttggtggtgctccttatctctaaagcagctgggcccagcagcgtgaacacttcatgtcagaactatgacatggtcagtgggatctactcatgtcaaagaagtttggcagagatcacggagctaattcatattgctctccttgtacatcgtgggatagtaaatttaaatgagttgcaatcatctgatggtccactgaaagacatgcaatttggaaataaaattgctatcctgagtggagactttcttctagcaaatgcctgcaatggactagctctgctacagaacaccaaggttgtggaacttttagcaagtgctcttatggacttggtacaaggagtatatcatgaaaattctacttcaaaggaaagttatatcacagatgatattggaatatcgacttggaaggagcagacttttctctcccatggtgccttactagcaaagagctgccaagctgcaatggaattagcaaagcatgatgctgaggttcagaatatggcatttcagtatgggaagcacatggccatgagtcataagataaattctgatgtccagccttttattaaagaaaagaccagtgactccatgacttttaatctaaactcagctcctgtagtcttacatcaggaatttcttggaagagatttgtggattaaacagatcggagaggctcaagaaaaaggaagattggactatgctaagttgcgagaaagaatcaaagctggcaaaggtgtgacttcagctattgacctgtgtcgttaccatggaaacaaggcactggaggccctggagagctttcctccctcggaggccagatctgctttagaaaacattgtgtttgctgtgaccagattttcatgacatcaaattaaaaagacactattgttagttagctgaaaatcctagggaatgaggttgattgggagcgctttcacgatgcgttaatgacttttaaaacatatgcatttttccttccttttatcacattgctaaatgagttctgctttctttttggaactgctacaaacaaaattagaagaaaaaaaggtcaagcagttttcacttgtcacgccagaagcacacttgaggctgcagtcgcagaaataattaatgagattcgctcctgtgaccc

SEQ ID NO: 84 - DNA, 652 bp, Homo sapiens
  CDS (68)..(550)
tatccgtgagcctggatgctttggagccaagctttcgtcccatgcaagggaaacaaccacttctgggatgtccgctgcaatctgctccggggctgcagcaacctcatcagctcttgcctggagtggctcagcctgggcctgcagggccaccaggagaatggcagcaaggatggcaagggtgctccttgctatagaagacctgggacagaggactgctgtctgccctctctggtcaccctgcctagctagaggatctgtgaccccagccatgaggaccctcgccatccttgctgccattctcctggtggccctgcaggcccaggctgagccactccaggcaagagctgatgaggttgctgcagccccggagcagattgcagcggacatcccagaagtggttgtttcccttgcatgggacgaaagcttggctccaaagcatccaggctcaaggaaaaacatggcctgctattgcagaataccagcgtgcattgcaggagaacgtcgctatggaacctgcatctaccagggaagactctgggcattctgctgctgagcttgcagaaaaagaaaaatgagctcaaaatttgctttgagagctacagggaaatgttattactcctgtaccttctgctcaatttcccttcctcgtccc

SEQ ID NO: 85 - DNA, 4628 bp, Homo sapiens
  CDS (3294)..(4205)
gatcttaaaacaaccagtttctttaattagaaagcaacaaacatgcaaatggcaagtgtagaaatttatttgaaccaacattttcactatgatgaaaattattcttcaacattgatccaagctcccacatttgaaggttagggaaaatattgcactttgcattttctagcactcctcatacacggcaaaaagttttaaaaacattctgctagttttgttttatacaatctcccaaattcatgcacacaatcattccaaaccaatgttaggttatcccaaaaaaagggaaaaactccaaaaaccataaccttaaaattgcactaaagctctgtaaagaaaaaaatataataaatgtcttatacaaatttcagaacatttaagtgcttgccaaaaagagtttattattcctcatcctcattttcattctcttgaccagagccttctgatctgtcaccctccaaccggtcagctcggatatgattaagtgaagccaacatcctcaacatgaaagaggctggaactgtaatggtgtttctagtttcttccagcatgagttcgtttcgagttataacttcatcagcaagttttcggttaaaaatccttgactcttctaatggtgaccagatctttatgtcataatctatgccagatgaggctaaaattgggtcaaacggatgtggctgcaggcagtttaccacatgattatcagcttccagaagcatcaaatgctcagcagtgtgccgatcccagatgaaaatgtggccacagtcagaaccactcattacaaagttagcaccccagaaattggcttcttttatcattgtcctggagttgcgatggcctttataaaccatttttactagcggccttctaatgttcaaagtatccaattcttccatttctttcctttcttttctccgtctgaagaactcctgaatacgggcaacagcagagcgtctatcaccaggtcctgctcgataccttgcacctgggatcaggactgggtcatcatcactgtcatctgtgtcctgaagagcagagtccctggtggatgtttcttcatgagctgaaggcccagtggcttctgtttggaactgaggctcaggattggtgttattttcattggtagcactctcagtgctagtctgatctgaagtttctggttccttggctttttcagatgaagcagattcttctggaaccccacaagagcgatcaagattgaggtcatttctttctcctgagttggaatccaatggcttggctgtgaacttatctgattgtgttatattgatatggttctcaactgggttttctgcagatactccttcctgatattttgtcacatcctctgatgattcttcaggagcttttgtttcactgtctccttctggtggttgcactgagctctgtgggacgaaagattcctcctgaccctcagatttgcaatggctcccaattcctctagaacttgatgctatactgctccattcatctgtaaagttcagttttattgtgcttgtagttgttccttctgtgctgtagtgcaaacttaaaactggttcacctgtccctggtttggggctcagcttttcattattgttatcctgttgctcgtcaagtgacatggatccgagctgtttgttaaccacagaagaaggagaatcagactgatgatgtgtgtggtgtccagatgcctcaacagactgcctttgttcactatctggagaagatagcaaaggagtagaatgagggctttctgtgggagatgatgtcgaatgagcctgagctgacattgtagaggatgtagaaggctgaagaaattgttcagctggagtatctacttccattgcagtttcactcacttccaaatcaggacttgatgggaccgtaggaagagttgaaatatctgattgacttgttccacctctgggtcgagatcttcctcgtcctctattgctttgtgcaacctcacttgcttcttcaaaccatcttgataacatatcagacattctctgcatcaatgacacattgggactctgctctccatctcgttctcgttcactctccggccttgctctgggtccagtatctgaccaatcaccacgaagtctcaaacgcttaactggtggttgtcgcaactcttctcttctctcttccgcagaaggagttttaagttctcgtgctgtatcatctttcgggtcaaaaagatatatgtaatctgaagagtaactaacgagaatctcttgaccatcttcactgtaacacagagatgtcactctgcaggacttattattaagatgggaaggaataaaacgggcaaccattccagtagtccctcgacctgcataattccctgtagctcttgtgcccagcattcgccgatcatatattcgtactgagctgtcagaacaaccaacagcaaggtaatatggtattggtgggcaaatagcaacagacgtggcagcacgtcgacagttaattaaaatatcatctttacaatcttcttttgtgcagctagttttgatgcgtgtatcaaaccacctaacagttccatcttcaccacaagagagaaaagtgtaagggtcattgggtacagtcataatctcataagtagttccataatgacacgtaaattggcattgtctgttggtttctgcatcttgctcaacgttggtataaaatattactccatctccagagcaggatacaatctgtttatcatttgtacaaggtaagaactttgcactaaatatgtttgctcggtgccctgaacgaattgttgtcaaaacctttctgctgtagggattactaattactaatttggtgtcatccgctctaaatgccattaggctttcttccctaagagctaaacagaaatcagccctttcaaaagactccactgctggtataaaccaaccacctgatgctgcccctcccttttgcagttttggcacaattgaccagcagttcttcctgcgacacacttgtttaggagtttcggttctcgctctctgttgcatggtttggtaacaacacttcactatactaaaaatcatcgcccggacctgcagggctgcacggaaaacgctgttccttttggtacccgccgcagccgcgcaggcgcaccgcccagccgccctgacgcaaggcgcaggcttcatgacgcagcacgcagtctcagccgacactgcgcgcgcctccaggcaccggcgttagcgggtcgccgacccgcaatccccgccgcggctgcttgcctaccggagtgtgcgccggcacctgccgccggagacatgttgcaaaaaccgaggaaccggggccgctctggcggccaggccgagagggacagagactggagccatagcggaaaccccggggcttcgcgggccggggaagacgcccgggttctcagagacggctttgccgaggaggccccgagcacgtcccgcgggccgggcggctcgcaggggtcgcagggcccctcgcctcagggcgcccgccgggcccaggccgcccccgccgtggggcccaggagccagaagcagctggagctgaaagtgtccgagctggtgcagttcttgctgattaaagaccagaagaagattccgatcaagcgggccgacatactgaagcacgtcatcggggactacaaggacatcttccccgacctcttcaaacgggccgccgagcgcctccagtacgtcttcgggtataagctggtggaacttgaacccaagagcaacacttacatcctcatcaacaccctggagcctgtggaggaggatgccgagatgaggggtgaccaaggcacgcccactacgggcctcctgatgatcgtcttagggctcatctttatgaagggcaacaccatcaaggaaactgaagcctgggactttctgcggcgcttaggggtctaccccaccaagaagcatttaattttcggagatccaaagaaactcattactgaggactttgtgcgacagcgttacctggaataccggcggataccccacaccgaccccgtcgactacgaattccagtggggcccgcgaaccaacctggaaaccagcaagatgaaagttcttaagtttgtggccaaggtccataatcaagaccccaaggactggccagcgcagtactgtgaggctttggcagatgaggagaacagggccagacctcagcctagtggcccagctccatcctcttgaaaggtggattcagagggacccccgggacaagggtctgagacccaaaggcacagtttagaggattgggggaagggagaacgaacccagggagcatattgctgtaaacgcttcaatgtgtgtagctttaggatgtgtttgcaaagttttgtttttttaatgttgtgttattttgctccagattttcatctataaacaaaggagcatttgttttgattttactctttttggtataaaaaattttgctagcttagtaaaacgaattggaaaacttgactatgatctggaacagataatgcaagaaggaacacataagtaagttgctttggtgccaagaaaataaaaaagctattatcaggtctcctaactaccccagtttgtaaggaaaaataaaagtttttataaaattaaaaaaaaaaaaaa

SEQ ID NO: 86 - DNA, 4911 bp, Homo sapiens
  CDS (174)..(1652)
tgcgatattctcgggtcgacgattccgtgaggaaacgaccgcggtcggagggctccggcgtgctcaactttcgaggcggcggaacgtgacccttccgtaccccaccataacatgcccgggtgacctcctcccagatcttccttgtggccttcctcgcccactccagtgacactatgcacccccaccgtgacccgagaggcctctggctcctgctgccgtccttgtccctgctgctttttgaggtggccagagctggccgagccgtggttagctgtcctgccgcctgcttgtgcgccagcaacatcctcagctgctccaagcagcagctgcccaatgtgccccattccttgcccagttacacagcactactggacctcagtcacaacaacctgagccgcctgcgggccgagtggacccccacgcgcctgacccaactgcactccctgctgctgagccacaaccacctgaacttcatctcctctgaggccttttccccggtacccaacctgcgctacctggacctctcctccaaccagctgcgtacactggatgagttcctgttcagtgacctgcaagtactggaggtgctgctgctctacaataaccacatcatggcggtggaccggtgcgccttcgatgacatggcccagctgcagaaactctacttgagccagaaccagatctctcgcttccctctggaactggtcaaggaaggagccaagctacccaaactaacgctcctggatctctcttctaacaagctgaagaacttgccattgcctgacctgcagaagctgccggcctggatcaagaatgggctgtacctacataacaaccccctgaactgcgactgtgagctctaccagctgttttcacactggcagtatcggcagctgagctccgtgatggactttcaagaggatctgtactgcatgaactccaagaagctgcacaatgtcttcaacctgagtttcctcaactgtggcgagtacaaggagcgtgcctgggaggcccacctgggtgacaccttgatcatcaagtgtgacaccaagcagcaagggatgaccaaggtgtgggtgacaccaagtaatgaacgggtgctagatgaggtgaccaatggcacagtgagtgtgtctaaggatggcagtcttcttttccagcaggtgcaggtcgaggacggtggtgtgtatacctgctatgccatgggagagactttcaatgagacactgtctgtggaattgaaagtgcacaatttcaccttgcacggacaccatgacaccctcaacacagcctataccaccctagtgggctgtatccttagtgtggtcctggtcctcatatacctatacctcaccccttgccgctgctggtgccggggtgtagagaagccttccagccatcaaggagacagcctcagctcttccatgcttagtaccacacccaaccatgatcctatggctggtggggacaaagatgatggttttgaccggcgggtggctttcctggaacctgctggacctgggcagggtcaaaacggcaagctcaagccaggcaacaccctgccagtgcctgaggccacaggcaagggccaacggaggatgtcggatccagaatcagtcagctcggtcttctctgatacgcccattgtggtgtgagcaggatgggttggtggggagattctgccccaggagaggtaatgcacccctgaaggatatgaggggatggaagagagggctggctgcccaagggaatggattcctcctgacctcaagggaattggtcccaggtacaacagagagcaagaccccaaacagggcgtggctgccacgattttcaaatgggggtatattaatcctcaggcaaatgctacacccgtacccaactaagccctgccaattctcagtgtggtagaggaagagaagcatgtctgagttggatgggaatgaggaaggagtgaggggaagaacagattccctaaactttcatgaggtcatccctagctccttaagagaaaaacatttagaaaaaaaaattttttctatctctgcccacccacacctgtgatgttgtgtgtgttgggggagcttccacaggagccacactggggaaaagctgtagtatcttctttgtttagcaagtcaaacttcacagctggggaagttgaaaacctttggaaaatgagtcaggaaaaggctgagacctcaatcggtaacaattccccaaagctgttgtaagactttgcattaaagccttcctttttcctgatgtgccctgggtggatggatctttgcaggagcctggcctgctgccttttagttacaacagcaatgtgggatgtggtatctgtgccttgtcctgggaccaatggcacagagggttatagcatgaactgaagggtccatgtcacagcataggtgccagcacgaaacttgtagatggggggtgaattccagataggctaattccctggttggtgaaacccttggttagtatttgattcccagcatctgtgtgtcaggccagagtgggggctgctgaaggcagagcttttatggatgcctgccacagacgtggtacatgggcccacttcacgatagaaggatgaaggtaaatcagcctctattatgtagcatccagctggacctagctgattctcaatgtatgccatctcttcatccagtctccttatcaagctcaggtgggattctgaattttccctaatatgctgctctgtaaagggaggagtccaagaaagcctggccccagctggcttagagtaggcttggcgatagtgaaaatccagtatatatctcctctgtgtggacaaggttgccttgctcctctcagagataccacctctgctgcaaagtcaaagcatggggttttgacatcagaagggttggaattgggtggtctctaccccagaatggcaatttggagtgcagcttcaagttctgccctctccacagattccaggcaatcctgaagcagagataatcagtagtactaaactttcagaaggggagttctgccaccccattcctccatcgagaggtctttgcagttgtggttgtgaggccagaggaacttaagaagaatgagctcaacattccattccatccaaggttgcagaatactttgagtatggagatgaccgatccctttaacctttccctttgactatactgcatgccctgtgagtggctgctctgagctttggcgggggatgagcagggtgaaggtgaaaatgttctctgatgttggtttttcttagtgtctcttctctcccacgtttctagtccattggaagttctccagatcctctagatttctgacctctttttacattctaagaggtgtcatttacctgtgggtgaggggcttggagggcctgactattaagcttcctattatgattggggaaggggactcaacatcttccccttgtctggtcctgggaactcaagactgctgtccatcctttattagtaacctagttttgttgagagagaggtgcagcatttccctcaagtacctgcatgctcataggtatgcatgcttataggtatgcatgcacaccagcaccttgacttccaccaggacagtgaatctgtagtccccattaatgatactctcagaatggtctccaccaatgtgcacaacttcatgcacacaattgtattcctctttaggagagacagtgaccatgccaggctcttcaaatacacactcctgtattttcatttctgaactccctgaagcttcacccacatctccatggcactgaatcacttttctgcccaggctggagttagaagaaccatgggttgaaggccttgggagaagaggtggtaaggagctacctggttctttggactcctcagaaacctcccgtgaagactatatatatgagcaatatatgagcaattaagatagaactaggtcattgaacggactcagaaggaaactggcaaggggctaagtagctgtgagctgctcttcctgttaaccgtcctcaggagagacccagtgtcttgatttattccagagactcctgagaattttgttactggagctataggaactaggactccctcctcagactcatcaggaaatctgggaaaatctcatctccatgctgcagtctccccgcttggcaccatctagggctctgaagatctttaaagtgagcgttaaatgaagcaggccttctggggcatcgtgatggagctcctgaggactgggagggccgttttcttcataattcctacccagtttagggaatgagaaaaggccctgtggctcttaagtctcctgactatatccactagtttggccttgagtttgagacacctggtagatgtacctggctgccctaccaagagatttgatttgtttcttcccgtggtttcaggtgatagaacccaaaggtagctttttaattggagaattgaataatcagcatatgtaagcgcactagaaccctgtgttgaaaactgccaggtgtgggtataagaaaaggccgagagatcaccacctcctcttaccctaccccacacccataaaccagacatgtctcccaggaagcaggtgtccctggacacagaggatgacagggctctacaatctgtgtaattattattattattattattttgtatttatggggcccaagaaaggggccaggagagggtacaccccagctggggagagcaaagcagatggatccagttttctgtgtgttcttacctctgtacttcctcgtagctctgctgacaaagcaagcaggcctcccgtgtccaagaccccattcctcccacttgtgtacacctaggctggcaaatcttggagcctctgggctctgaaaactagacaatgatcattaaacctggcttgagtctctgttctggc

SEQ ID NO: 87 - DNA, 2480 bp, Homo sapiens
  CDS (462)..(2153)
ggttgcagccagggaagcctccgcggtggtgcaagtggaacccaagccttgaggtttcagtgagtagggggccgacgtgagctttagcgtccccctttagcctccctcttcgattccttgaagaccctggtgcagcttagcaagagggcccaggatttttggatccccagccctgtgacaagggttcctgtccagtttccccctcccaggatttcgactcagttcagcgaagtcaccgcccgtctgagaaatgaggacaccaaggcttagagcacagccccgaggcgccgtctaccaggccccgtcccctcccccggctcctgtcggtcagcactgaaaccccgtccctgctccaggcctccttctctggggtccaaggtcccatacaggcctctgcctcggccgcaggcccttcagtcaccgtcgcctcgtctccctgactgtccgcaggcctgggcagcatggccgtattccggtcgggtctcctggtgctgacgacgccgctggcctccctagcccctcgcctggcctccatcctgacctcggcggcccggctggtgaatcacacactctatgttcacctgcagccgggcatgagcctggagggcccggctcagccccagtacagccccgtgcaggccacgtttgaggttcttgatttcatcacgcacctctatgctggcgccgacgtccacaggcacttggacgtcagaatcctactgaccaatatccgaaccaagagcacctttctccctcccctgcccacctcagtccagaatctcgcccacccgccagaagtcgtgttgacagatttccagaccctggatggaagccagtacaacccggtcaaacagcagctagtgcgttacgccaccagctgttacagctgttgtccgcgactggcctcggtgctgctatactccgattatgggataggagaagtgcccgtggagcccctggatgtccccttaccctccacgatcaggccagcttcccccgtggccgggtctccaaagcagccggtgcgtggctactaccgtggcgctgtcggtggcacgtttgaccgcctgcacaacgcccacaaggtgttgctcagtgtcgcgtgcatcctggcccaggagcagcttgtggtgggagtagcagacaaagatctgttgaagagcaagttgctccctgagctgctccaaccttatacagaacgtgtggaacatctgagtgaattcctggtggacatcaagccctccttgacttttgatgtcatccccctgctggacccctatgggcccgctggctctgacccctccctggagttcctggtggtcagcgaggagacctatcgtggggggatggccatcaaccgcttccgccttgagaatgacctggaggaacttgctttgtaccagatccagctgctgaaggacctcagacatacggagaatgaagaggacaaagtcagctcctccagcttccgccagcgaatgttggggaacctgcttcggcctccatatgaaaggccagagctccccacatgtctctatgtaattgggctgactggcatcagtggctctgggaagagctcaatagctcagcgactgaagggcctgggggcgtttgtcattgacagtgaccacctgggtcatcgggcctatgccccaggtggccctgcctaccagcctgtggtggaggcctttggaacagatattctccataaagatggcatcatcaacaggaaggtcctaggcagccgggtgtttgggaataagaagcagctgaagatactcacggacattatgtggccaattatcgcaaagctggcccgagaggagatggatcgggctgtggctgagggaaagcgtgtgtgtgtgattgatgccgctgtgttgcttgaagccggctggcagaacctggtccatgaggtgtggactgctgtcatcccagagactgaggctgtaagacgcattgtggagagggatggcctcagtgaagccgcggctcaaagccggctgcagagccagatgagcgggcagcagcttgtggaacagagccacgtggtgctcagcaccttgtgggagccgcatatcacccaacgccaggtggagaaagcctgggccctcttgcagaagcgcattcccaagactcatcaggccctcgactgaaaagttctcagtggggccagactggctcctggagctgacaagcgaccccgtggtgaggagaaatgggggccttgatgctcaccctggttcaggcccagaggtccaagctatactgtgcaggacatggccaggcctggtggacacaggaagcctacccaacacgctggtatttggccaacactgaggatgtggttcatgggggagcagtcccctccccactcttgcccatgggtgactcttacccacagctgactagggccagcgcaaatactggaacctgtaacagaattaaaggtgaatgttctgagaaaaaaaaaaaaaaaa

SEQ ID NO: 88 - DNA, 1662 bp, Homo sapiens
  CDS (228)..(635)
gggctgtccgatcgaggccgggcgttcacgggcggccaggcttgagtcccgggtcggggccgggggattgccggcgcatcagggccgagggctggggctggcggggccgctcgctgcctctcgctcgcagcagcggcggcaggcgcgggcgagggccacggggagaggagacgcagccccgcgggtggcacgctcggccgggccccggcccgcgctcaacgggcgcgatgctcttctcgctccgggagctggtgcagtggctaggcttcgccaccttcgagatcttcgtgcacctgctggccctgttggtgttctctgtgctgctggcactgcgtgtggatggcctggtcccgggcctctcctggtggaacgtgttcgtgcctttcttcgccgctgacgggctcagcacctacttcaccaccatcgtgtccgtgcgcctcttccaggatggagagaagcggctggcggtgctccgccttttctgggtacttacggtcctgagtctcaagttcgtcttcgagatgctgttgtgccagaagctggcggagcagactcgggagctctggttcggcctcattacgtccccgctcttcattctcctgcagctgctcatgatccgcgcctgtcgggtcaactagcctcaccgaggtgccggagagggagcgctggacaactagaatgttgacctcgagccgaggccctacttgcagcgcaccggaggagaggctctctagtctgaaggcaccgccggcttgcgccgagctgagtgccgggtttccctattccaatcctgtttgaaatggtttcttcagcagggcttaaaagagcagccttcatcctgaaaatgtatttccttttgtttaatgctttgagtagataatcctgaattgaggtcatgaggaggccccccaggccagacagtcctgaacccctctgacacttggaaactgaatataagtaaaatgtccaggtggactctgagtatttcctgtggatcctgggaaagtactgttgcacaaaggctgcaaagctggactcaggaatgtcctccaaccagcagcgctgacctaagagctccctgtgccgtctatccagaccagacttcggtagatgcctttgttagatctatcacatgtaaacgagcttgtatctccttccctgtgccacgagagagattggctttttattccagtctaggcagagacagaagaatgttgaataagagcacgattagagtcctgtctggttatctgttgcccaagaaaagaactctgctgtccaggcactgcttggcttactatcccagcaaagactgcagttttgtggacttttgaccaccttgggctggcactcttagcacacctgagacagatttaagcctccctaagagactgaagagaggaacaggtgtcagatactcataggcactgagatctacaaatgggaagcttgtgagtggcccatctttgttggcctacgaactttggtttgatgccagtcaggtgccacatgagaacctttgctgagatgcaaatgggaagcttgtgagtggcccatctttgttggcctacgaactttggtttgatgccagtcaggtgccacatgagaacctttgctgagatgcaaataaagtaagagaatgttttcctgaaaaaaaaaaaa

SEQ ID NO: 89 - DNA, 546 bp, Homo sapiens
  CDS (66)..(269)
attagaataaatgttgttgccaaatgaaaacatgacactgtatataactgctgaggcctattctcatgtttaaccttcctaagccagttttcttaagttggtggagatggaagactatagtaattttcctagcatgtctggcatctgctgctataaaagagacagcagtaagcatgaagactgtgtttcccatatttgtccaaatcactttgattttgcttttagagtcaagagtcttaaaaattggtgatttttccaattttttctgctaatagtatatttaaaaattagcatatgctttaggtacatgaaactttaaaaaagtaattataatgtacagttaaaaatttatagtaagtggatctcacaattcattttctaattagtaattgatagttttacccattaaaatgacaatgaaaatatttttactatgggttttcctcccatttgtttctaatcatacctttgataatattttataaaggcttataatcatagcagggaattaatttactacttaaattttatgtatatgtacagtac

SEQ ID NO: 90 - DNA, 1889 bp, Homo sapiens
  CDS (366)..(1334)
ggacaggactctttttgtgacttccgcagctgacacacttgccttcctataatctggtaggagtcacaggatacgcagtgatggtgcagctctctctcagggaagacaggtacaggtatacagacctctggtgctcacatttaaaatactgaaatcctcccaatattgttttggggcagccaggttgatccaatcctccatttgggtagaagtctatgtttcctaatggctccttgtagcccagtgcatcagtgtcggaatggatgacatcaacaaactgcgcatcactgggatctaatctgtcttggtgaggtttcccgttgaataaggctgcagggtcagagtgcctgtaattctccccagccatggtcttgaaggaatttattgaccagatgttggcagaaggagcttctcttgatgacatttacatgatcggagtaagtctaggagcccacatatctgggtttgttggagagatgtacgatggatggctggggagaattacaggcctcgaccctgcaggccctttattcaacgggaaacctcaccaagacagattagatcccagtgatgcgcagtttgttgatgtcatccattccgacactgatgcactgggctacaaggagccattaggaaacatagacttctacccaaatggaggattggatcaacctggctgccccaaaacaatattgggaggatttcagtattttaaatgtgaccaccagaggtctgtatacctgtacctgtcttccctgagagagagctgcaccatcactgcgtatccctgtgactcctaccaggattataggaatggcaagtgtgtcagctgcggcacgtcacaaaaagagtcctgtccccttctgggctattatgctgataattggaaagaccatctaagggggaaagatcctccaatgacgaaggcattctttgacacagctgaggagagcccattctgcatgtatcattactttgtggatattataacatggaacaagaatgtaagaagaggggacattaccatcaaattgagagacaaagctggaaacaccacagaatccaaaatcaatcatgaacccaccacatttcagaaatatcaccaagtgagtctacttgcaagatttaatcaagatctggataaagtggctgcaatttccttgatgttctctacaggatctctaataggcccaaggtacaagctcaggattctccgaatgaagttaaggtcccttgcccatccggagaggcctcagctgtgtcggtatgatcttgtcctgatggaaaacgttgaaacagtcttccaacctattctttgcccagagttgcagttgtaactgttgccaggacacatggccataaataatagaaagaaagctacaaccacaggctgtttgaaagcttcacctcacctttctgcaaggcagaaaaagtatgaaaaaaaccaaggcttttttcagtagcgtcctatggatgtcacattgtacatcaaacaaccttgtgattataaaacgatcccgggaaggagcccctaactagggcaagtcagaaatagccaggctcgcagcagcgcagcgctgtgtctgctgtgtcctggggcctcccttgttccgacctgtcaattctgctgcctgtcacgcgggtggttctgcccatcgcggctgcgggtcaagcatcttcaagggaaggacggactggaggcctcaccgtggactcaactctgcattctccgtgccacattcctccagttcccacacgtagaagggaacgaaactgacgtctacctcatggggctgctgtgtgggtttgggaggcaaaaatctatgaagggttttttgaaatcccataggtgccacatctatgagatgtttgataaatgtgaatatgcc

SEQ ID NO: 91 - DNA, 1526 bp, Homo sapiens
  CDS (772)..(1206)
ccaaaacaagcttaggagatttttattctttaccagaaatgatatggcttgggaggaaggtgtgtgcattacacacaggttgctctgtggtcactgctccttcatactgtgtttctgcctctgcctgaacccaaacccctcccagcctgacagaaatgttcgcttacgcagctagccctgcctcagtttgtacatctacctgtcggctgagacatcagaagtcgatgtccatgtcagcctctgggcaccccaagatgatgttacctccaatagacagtgaaggagataacttcaaggctatgtaagaaaaatgcacattctttgtgaaactaatgtgtacccactgcttcttaattttttgctgtggattttatagtctgagattttgttacagttgtccacaaggcgtccttcctccatgtgattttagttaagcacatcttttgtcatgatgtcctcggttgtgtattgtgtgtcttcgtgccttcgcgtactacaaaatgtataagaagttcctgctcctcccaagttgctttcagcatgtggaattttatacatatatcatttgtttacttccaaaactttttagttgcctgttcttcagttacgccagcatatcctttatttctttcgtattggcacagttctctatgtaagcaatttgagagggaagcaaaggggaaaagtttgagttagctgttctctgtcctagaatttccctgcattaatcttgtccttgaaaatatatataatactggtcccttaaactccatgaggctttgtctcattatgtattgttcttttggtaccctttcccacttaacttaccttttgctcctaagtcctataaaataccccttggatctggattttttatacccgattttctccactgtgtataaaaggtatattgtgactgtaaatttttgtatatcatgttctgagagcttcttactttctgatctcatagcactattcctgatcagagaactccagttgcttcaacacacagtatcagtagtgcagccaccccagatcgaatccgcttcccaagaggcactgccagtcgtagcactttccacggccagccccgggaacggcgaaccgcaacatataatggccctcctgcctctcccagcctgtcccatgaagccacaccattgtcccagactcgaagccgaggctccactaatctctttagtaaattaacttcaaaactcacaaggagtcgcaatgtatctgctgagcaaaaagatgaaaacaaagaagcaaagcctcgatccctacgcttcacctggagcatgaaaaccactagttcaatggatcccggggacatgatgcgggaaatccgcaaagtgttggacgccaataactgcgactatgagcagagggagcgcttcttgctcttctgcgtccacggagatgggcacgcggagaacctcgtgcagtgggaaatggaagtgtgcaagctgccaagactgtctctgaacggggtccggtttaagcggatatcggggacatccata

SEQ ID NO: 92 - DNA, 1365 bp, Homo sapiens
  CDS (349)..(609)
cagtaacttcatggacttttaagtgcgggatgaaatgcaacattacgcttacaaacagtactgtcaaacctcaaatgctttctttcttcagatgctttttcgtgtacatgatactagtagacacttttctctttatatttaccgagagggaaaaccatacgcaataaaatattgatgtttgaaggcagtggtcaccaattggttaaaaaactatgaaatgtaaaccgaaatggtatatctctatcctttttgcttttctctgggtttttaatgtatggaataaatctcataaatagaaagaaaaataatctagaaatttttcaaagctagtactctttctccttataaatgtacacaattttaatctttttacaaatttatttaactgtacctactgtacttattgtagattcaatgacgcagttaagtcatcacccaaggatttatgaatttgagattactgacctgttttcttcatattgcattcacatcaatatttgtgaatttgttgttcagcttttcattcaaacaaaaaatattccctcaagaaagctccatttttatcataaacatttcaacataaccaacattagaacaagtctgccatgttaaaaataatttaaagacttatctctgaaaacggtatccagaaacgcaggtgttcccagtaatgtagcttcaaaaataaaatgtgctatttatatgacatgaaattcataacttttggaagggtatatttatgacagcataaaaaataaattctgtgctataaagaagatccaacaaattaaccatataagcacagaaagtagagaaacacagttattgaatctactcttgtcattaacattttcaaaaaacaaaatgcatattgtaatatttggtacatgacacttgcatgttgatatgcctatatacttacaaagtattcaatgtgtacttagcggcgcttaaaatatgtcatgtacaactcttataaacatttttacagggttcccatttgcacttcatctttcagtaaagtcttgtcagaaaaaaattgtctgataaatatggaaaaataaaatttgaattttagttatctgttggacattactgaattgtctattcatttagtacattttcttaaccttgaaaacagacgttgaaagatggaactttcttttttccagtgacaggtcattaaatcgatggtacaaaacatacttctttatgccaaacacattattttgaatacctttttttcaacttcatacattatccatccattttagttttcctcgatgatgcccattttctttgtaaatttctaagtggaagttttaaaaattatagcatcagtaaaataaatgttatcttatttgc

SEQ ID NO: 93 - DNA, 1175 bp, Homo sapiens
  CDS (553)..(702)
  misc_feature (1)...(1175): n = a,t,c or g
gcaattcttgctgcctgtgggtcctttttctttcatggagcctgctgggtcttgtctcacctgtgctgagctcctctggggttttgatttcttccttccttatcaggccctttggggtaagcctgctggttgtacctgacatagggaggcagttaggggcagtccctggtggggccgccctggcagcctccagctggcaccatcgtgtgcctggtttccctgcaacacctgcctctctgtccctgctgctgcttggctcaagcccaacaggcagcgtgcatggaggtggttacacacagctgtttccgtgagggtgaccgtgtctgcagcacgcttccgtctccgcatgcacggctgcctctccagccacctctgatacttctctcttggggccatcagagcctcccttgggctgtcacctcccagctcacacacactcttcagtggtttcctctcttcattctcttatagggcgtggtccttcttatttatctaaagggctgaatttaggagactttttacccaggggcaaaaggctcttagggtaatgagatggatggtggcccaggtgcattttccagggcctgggttctccagatcccgtggcttctgttgagtggaggcaactttgctctgtgtgaacctcgcccctgtccctctgccgggcacccctggcaggaagcaggactcccatcctcaccctgacttagactgtcctctgagtcagctcctctccaagacaggagtgggcagccctgggcagtcttctggccccttgctaaagtgaagggaaggaaagctggggctgccctccaagaagccggggtaaggacttctgaaaattacttctctaaacggaagcagggctcttcagttccacttggcgtccccctccataagggccttcctcactganggaccccacccccgtatccgttccccagcagcctttggaccttaactttttccgtggtcgtggggtctcagcccaggggaacttgaattagggggattggaagggcagccaaaggtaacagctccagaaagagggcctgcaacccaacctggttcttcaatccctgggattaacttggaaactgattgggttttggtaaagttggtttggtggtggttggtgtttgcatggnggtaaaggaatgtgaagggagtgtgtg

SEQ ID NO: 94 - DNA, 1052 bp, Homo sapiens
  CDS (365)..(508)
gccgggagtggacgccgccgaggcccggagtcgcgcctgcagacacagcatctactcagcgtgggtcacctctgtgaacatcactgactgcaagcctccctcaatttctggtgcagcccatcagggacccacagcgcctgggaggatggtgcggatcttggccaatggggaaatcgtgcaggacgacgacccccgagtgaggaccactacccagccaccaagaggtagcattcctcgacagagcttcttcaataggggccatggtgctcccccagggggtcctggcccccgccagcagcaggcaggtgccaggctgggtgctgctcagtcccccttcaatgacctcaaccggcagctggtgaacatgggctttccgcagtggcatctcggcaaccatgctgtggagccggtgacctccatcctgctcctcttcctgctcatgatgcttggtgttcgtggcctcctcctggttggccttgtctacctggtgtcccacctgagtcagcggtgacctctgagggctgataggggtgggtttgttgagagggacttgctgggccttggtgtgagagcaggcatatttggaggggatctggtggtgccttgaaggtatgatcagagaggggaccacaggtgtgtgcttcccctttgtgttaagcgtgaggcagagggagacgttagtccagcatttccaaagtgtgggtgggtccgttggttccccaaaaacttttaggtggtatggggcctgcattaagtggcccaaaatcagagcaagaaagcgatgcccttcccaattctctcaatccttttatgccgaaaagatttcagctggatgccaacatgttccgatgcctgtggaaaacatgccgacgtttcctctgcctagggagcaggacttgggcttagggcaggtggaaaaaattccagacttttttagccctgttttttttttaatgggatatttttattggcccctttattgtttaggacaagtggtaggggccttttatttattgtgcccttttcaataaatagatttaagtaaaaaaaaa

SEQ ID NO: 95 - DNA, 1968 bp, Homo sapiens
  CDS (415)..(1872)
tttcgtgggtgccctgccgaagaggggaagatgcagcgagggagagacctagaaccgcgatcaaagctgcagcagctgctggggctggcggcacaaagggaggagggaggagcctgggcgctgagaaagttcttggggaaagttgagctgagccaagagtcgggcggtggctgggatgggcgggagggcccggcccgatttcccttgctgctccccttgtggcctgacgctgacagaggcaaaaatctgctaactcagggggcagactcaaccaagactgtgagcaggcctggggaatgaccccccgatctccaaccagtgccttccgcagctgcacggctgtctccagctgtctctgcccctcttcctggccctggctccatctctctgtcacctcacccttccctgtgccacatgggccctctctctcctgccaggacgctgcggctctggggacctcggagcctgggggtggctctgggagtcttcatgaccattggctttgcactccagctcttgggagggcccttccagaggaggctacctgggctacagctccgacagccctcggccccatccctacgaccagcccttccgtcctgcccaccccggcagcgactggtgttcctgaagacacataaatccgggagcagctctgtgctgagcctgcttcaccgctatggggaccagcacgggctgcgcttcgccctccctgcccgctaccagtttggctacccaaagctcttccaggcctctagggtaaaaggctaccgcccacagggtggaggcacccagctccccttccacatcctctgtcaccacatgaggttcaacctgaaagaggtacttcaggtcatgccttctgacagcttctttttttccattgtccgagacccagcggctctggctcgctctgccttctcctactataaatccacctcatcagccttccgcaagtcaccatctttggctgccttcctggccaatcctcgaggcttctacaggcctggggcccgtggggaccactacgctcgcaacttactatggtttgactttggcctgccctttcccccagagaagagggccaagagagggaatattcatccccccagagaccccaaccccccacagctgcaggtcttgccttctggtgctggccctcgagcccaaaccctcaatcccaatgccctcatccatcctgtttccactgttactgatcatcgcagccagatatcaagccctgcctctttcgatttggggtcttcatccttcatccagtggggtctggcctggctggactctgtctttgacctggtcatggtggctgagtacttcgatgagtcattggttctgctggcagatgccctgtgctggggtctagatgacgtggtgggcttcatgcacaatgcccaggctggacataagcagggcctcagcactgtcagcaacagtggactgactgcggaggaccggcagctgactgcacgggcccgagcctggaacaacctggactgggctctctatgtccacttcaaccgcagtctctgggcacggatagagaaatacggccagggccggctgcagacagctgtggccgagctccgggctcgccgagaggccctagcgaaacattgtctggtagggggtgaggcttctgaccccaaatacatcactgatcgccggttccgccccttccagtttgggtcagctaaggttttgggctatatacttcggagtggattgagcccccaagaccaagaggaatgtgagcgcctagctacccctgagctccagtacaaggacaagctggatgtcaagcagttcccccctaccgtctcactgcccctcaagacttcaaggccactctccccataaacatcagactacagatttaggtggaagagcagccatgtttgaagggcacatgtgatgagtggggggcagcaagatgccatttctgcatctccc

SEQ ID NO: 96 - DNA, 1309 bp, Homo sapiens
  CDS (1)..(756)
atgttccagccggcgcccaagcgctgcttcaccatcgagtcgctggtggccaaggacagtcccctgcccgcctcgcgctccgaggaccccatccgtcccgcggcactcagctacgctaactccagccccataaatccgttcctcaacggcttccactcggccgccgccgccgccgccggtaggggcgtctactccaacccggacttggtgttcgccgaggcggtctcgcacccgcccaaccccgccgtgccagtgcacccggtgccgccgccgcacgccctggccgcccaccccctaccctcctcgcactcgccacaccccctattcgcctcgcagcagcgggatccgtccaccttctacccctggctcatccaccgctaccgatatctgggtcatcgcttccaagggaacgacactagccccgagagtttccttttgcacaacgcgctggcccgaaagcccaagcggatccgaaccgccttctccccgtcccagcttctaaggctggaacacgcctttgagaagaatcactacgtggtgggcgccgaaaggaagcagctggcacacagcctcagcctcacggaaactcaggtaaaagtatggtttcagaaccgaagaacaaagttcaaaaggcagaagctggaggaagaaggctcagattcgcaacaaaagaaaaaagggacgcaccatattaaccggtggagaatcgccaccaagcaggcgagtccggaggaaatagacgtgacctcagatgattaaaaacataaacctaaccccacagaaacggacaacatggagcaaaagagacagggagaggtggagaaggaaaaaaccctacaaaacaaaaacaaaccgcatacacgttcaccgagaaagggagagggaatcggagggagcagcggaatgcggcgaagactctggacagcgagggcacagggtcccaaaccgaggccgcgccaagatggcagaggatggaggctccttcatcaacaagcgaccctcgtctaaagaggcagctgagtgagagacacagagagaaggagaaagagggagggagagagagaaagagagagaaagagagagagagagagagagaaagctgaacgtgcactctgacaaggggagctgtcaatcaaacaccaaaccggggagacaagatgattggcaggtattccgtttatcacagtccacttaaaaaatgatgatgatgataaaaaccacgacccaaccaggcacaggacttttttgttttttgcacttcgctgtgtttcccccccatctttaaaaataattagtaataaaaaaaaaa

SEQ ID NO: 97 - DNA, 1274 bp, Homo sapiens
  CDS (21)..(233)
agctgcatcgcgggaggcgcatggcggggatggcgctggcgcgggcctggaagcagatgtcctggttctactaccagtacctgctggtcacggcgctctacatgctggagccctgggagcggacggtgttcaattccatgctggtttccattgtggggatggcactatacacaggatacgtcttcatgccccagcacatcatggcgatattgcactactttgaaatcgtacaatgaccaagatgcgaccaggatcagaggttccttggggaagacccaccctacgaagttggaatgagaccatcagatgtgataagaaactcttctagatgtcaacataaccaaccttataaagactaaaattcatgagtagaacaggaaaatcatcctgactcatgtgttgtgttctttatttttaattttcaaagaggctcttgtatagcagtttttgtctattttaacattgtagtcatttgtactttgatatcagtattttcttaacctttgtgactgtttcaatattacccccgtgaaagcttttcttaatgtaactttgagtacattttaattgccttctatttttaaaactcaaaatcattagttgggctttactgttcttgctattgtatggcatatacatctgcctggatatatttctactcttgaccaaagttttgtaaagaacaatataagatttcgggtaggggtatggggagggaagatattttattgagaactacttaacaaaagatttatctgtaagcttgaactcaggagtacagttttagctatctagactctaacagcttttgctttaaaattattaaagtgtttcttaatgaaaaagaaaagatcttgctaaagttaaaataaggaacatttcaccttttaaatatttaattcttatgtggacttatttccagaaaactttggtgataattcttgagacaaaaggtggttaagtagcattattatgtaatgcttatataccatagagtttttaatagaagagaaatccatttcctccgagggtcactattaacaatgtacttccttaaatttagtttaatgattgtaatgggtgctgcatttgcacattgcattaagttatgatgagacgaattgttgttaaaaattatagcaaaaagaaatgtaaacttggttaaaatcctttcactctttgtattgttttttttaaggtttttattccttaaatgtaaaatgactacctaattttttgatgtaaatacattaaattcaaagagaaaaaaaaaa

SEQ ID NO: 98 - DNA, 2058 bp, Homo sapiens
  CDS (276)..(1871)
agtcagctggggtgtcctccctctgctgagcctcctccccctgcggccttcgccttggccctcggtgcactgcatcggtgtgccaactgctcactgtgcacagacctttttcatactgatgaattcatgtttattactttttaaaaagtttatttcttggatcttagtcacagctaaccctgattttgctttcagtacaaggatttttaatttctagaccggatttgagttgtttgaacggaggtctggtggctttgggaaaggtctttgcatggatgatgggggaaggtgcctttttggtgagtgccatagtcggctgccaccttgccatccagagagattcctgcttgtggacactgttcagttatgcaggacgttctagtacacagcagggactctcaactctcgcgctcagacgttctagtacacagcagggactctcaactctcgcgctcagacgttctagtacccagcagggactctcaactctcgcgctcagacgttctagtacacagcagggactctcaactctcgcgctcagtcgttctagtacacagcagggactctcaactctcaggctcagacgttctagtacacagcagggactctcaactctcgcgctcagtcgttctagtacacagcagggactctcaactctcaggctcagtcgttctagtacacagcagggactctcaactctcgcgctcagtcgttctagtacacagcagggactctcaactctcacgctcagtcgttctagtacacagcagggactctcaactctcacgctcagtcgttctagtacacagcagggactctcaactctcacgctcagtcgttctagtacacagcaggtactctcaactctcgcgctcagacgttctagtacacagcagggactctcaactctcacgctcagacgttctagtacacagcaggtactctcaactctcgcgctcagacgttctagtacacagcagggactctcaactctcgcgctcagacgttctagtacacagcagggattctcaactctcacgttcagtcgttctagtacacagcagggattctcaactctcacgctcagtcgttctagtacacagcagggactctcaactctcacgcagggactctcaactctcgcgctcagtcgttctagtacacagcagggactctcaactctcaggctcagtcgttctagtacacagcagggactctcaactctcgcgctcagacgttctagtacacagcagggactctcaactctcacgctcagtcgttctagtacacagcagggactctcaactctcacgctcagtcgttctagtacacagcagggattctcaactctcacgctcagtcgttctagtacacagcagggactctcaactctcacgctcagtcgttctagtacacagcagggactctcaactctcacgctcagacgttctagtacacagcagggattctcaactctcacgctcagacgttctagtacacagcagggactctcaactctcgcgctcagacgttctagtacacagcagggactctcaactctcgcgctcagacgttctagtacacagcagggactctcaactctcgcgctcagacgttctagtacacagcagggattctcaactctcacgctcagacgttctagtacacagcagggattctcaactctcacgctcagtcgttctagtacacagcagggactctcaactctcacgctcagacgttttagtacacagcagggactctcaactctcacgctcagacgttctagtacacagcagggactctcaactctcacgctcagtcgttctagtacacagcagggacctctcaactctcacgctcagacgttctagtacacagcagggactctcaactctcacgctcagacgttctagtacacagcagggactgtcaactctcacgctcagacgttctagtacacagcagggactctcaactctcacgctcagacgttctagtacacagcagggattctcaactctcacgctcagacgttctagtacccgcgcagagttc

SEQ ID NO: 99 - DNA, 1366 bp, Homo sapiens
  CDS (45)..(956)
tcccgggtcgacgatttcgtccagccgcattggaggaacgggctatggaaaaattgagagaaaaagttccatttcagaatagaggaaaaggaacattatcatctattatcccgaataactctgatacaagaaaagcaactgaaactacttctctgagtagcaagcctgaatatgtaaatcctgactttagatggagtaaagatccttcctccaaaagtggaaatctgttggaaaccagtgaggtaggttggacatcaaaccctgaggaattggacccgatcaggctggctctcctgggcaagtcaggtctgagctgtcaggtggggtcagccacatcacaccctgtgtcctgccaggagcctatagatgaagatcaaagaataagtcctaaagataagtcaactgctggccgtgagttcagtggccaggtttctcatcagaccacctctgaaaaccagtgtactcctattcccagcagcacagttcacagctctgtggctgacatgcagaacatgcctgctgctgtgcatgcactcttgacacaaccctctctcagcgctgctccttttgctcagcggtatttgggaacactcccttcaactggaagcaccaccttgcctcagtgccatgctggcaatgccacagtctgtggcttctcaggaggccttccctatccagctgttgcaggagagcctgtgcagaactctgtggctgtgggaatttgtctaggatcaaatatcggctctggatggatgggtacctcttccctctgtaacccatattctaataccttaaatcagaacctgctaagcacaacaaaaccttttcctgtgccgtctgttggtacaaactgtggaattgaaccatgggattcaggagtgacatcaggattgggtaagatgctttttctctattattattacttgctattattttctcaaatgacaccacaaagctagtttgtttcaaggagttactggttagcattaattccttgtaagttttgtgcttcttcctaaactgagaacaccgtgtatttctgtgcaagcgtccctaaagttggcttagaaaaacgctacacttatgcaggtgacaggctgcctatggctctgtcttccttatctctcttttgctctgccattccagttttgtgattatttcccctaggaaatgtccagtttagaattgaatcccagaatgagtgagtgcctccaccttgtgagtctctgggtggctgctgtgggtggagaggcagcactctcgggtgcatttgtgggggcagcttctctcgggagctgtgcttttactgacaggtgcacacggccatggggtgctgtctttttgccctccgagcaacttctgagtg

SEQ ID NO: 100 - DNA, 1336 bp, Homo sapiens
  CDS (71)..(631)
attgctgcctggtgtgggaaattatgagtcttattttctgtttattctttttacaagccgagcttgggtcatggcggcgccgggcgcgctgctggtgatgggcgtgagcggctcggggaaatccaccgtgggcgccctgctggcatctgagctgggatggaaattctatgatgctgatgattatcacccggaggaaaatcgaaggaagatgggaaaaggcataccgctcaatgaccaggaccggattccatggctctgtaacttgcatgacattttactaagagatgtagcctcgggacagcgtgtggttctagcctgttcagccctgaagaaaacgtacagagacatattaacacaaggaaaagatggtgtagctctgaagtgtgaggagtcgggaaaggaagcaaagcaggctgagatgcagctcctggtggtccatctgagcgggtcgtttgaggtcatctctggacgcttactcaaaagagagggacattttatgccccctgaattattgcagtcccagtttgagactctggagcccccagcagctccagaaaactttatccaaataagtgtggacaaaaatgtttcagagataattgctacaattatggaaaccctaaaaatgaaatgacaatgattttgtatcagtggtccaaacagaactaagcataaatcattgtgccatcccaaacctcgttccagccgccttgcccatactagattctaaatgtttctaaaggcaaaccccaatgtgtcaagacagacttgtttaggtgtaattttaggaattatgctggttcatcaggaagcagagggggagttttaaaagtcaagcttaaattgaagtttaaattcatctataaccaaatcaaatgatcagaggaaattctgtaatcaatgctggaaatcgttacattgtttagaacattcttgctcatgcctgtatttgcacaaataaatgaaacttcgctgtccttggcattccctggaaattgatgttgggagtataaacatgtacataatctacccaccacccagcacaccacacacctcctaatcctctctctgtcctggagctgtggttcagaatagtggctcttaagctaaggtctcaaaaggtagtcattgcagaacaagcaaactttgttcagttccttaaatggcataatgcaaacatacttaccagtagcaataccaagcttcttgccttttgcctaaaattatgtcaactcaaactgtctctgctgatcaccagctctgtgctgagtggttgtgtgttatgtatctgtgtgtaatttaaacgtagaaacttaactgctacttaaaaagcaga

SEQ ID NO: 101 - DNA, 3450 bp, Homo sapiens
  CDS (1)..(2940)
atggggagaagaaagggtaggtctgcgctgagccggagtagtttggaaagggtgaatcagggagaggttaaagtgattggaaggggagcgagggagggcggtggggggcaggcttggggtactgggggggggggcagagaccttagttgcgggatcccgcgctcagcgtcgcccctcgcgcccctagcggctcccgccatcactcaggcgcccgaggcgctgtcgcggacgcgggcgagcacagcgcgcttcgtgtgccgcgcgtcgggggagccgcggccagcgctgcgctggctgcacaacggggcgccgctgcggcccaacgggcgcgtcaaggtccagggcggcggtggcagcctggtcatcacacagatcggcctgcaggacgccggctactaccagtgcgtggctgagaacagcgcgggaatggcgtgcgctgccgcgtcgctggccgtggtggtgcgcgaggggctgcccagcgcccccacgcgggtcactgctacgccactgagcagctccgctgtgttggtggcctgggagcggcccgagatgcacagcgagcagatcatcggcttctctctccactaccagaaggcacggggcatggacaatgtggaataccagtttgcagtgaacaacgacaccacagaactacaggttcgggacctggaacccaacacagattatgagttctacgtggtggcctactcccagctgggagccagccgcacctccaccccagcactggtgcacacactggatgatgtccccagtgcagcaccccagctctccctgtccagccccaacccttcggacatcagggtggcgtggctgcccctgccccccagcctgagcaatgggcaggtggtgaagtacaagatagaatacggtttgggaaaggaagatcagattttctctactgaggtgcgaggaaatgagacacagcttatgctgaactcgcttcagccaaacaaggtgtatcgagtacggatttcggctggtacagcagccggcttcggggccccctcccagtggatgcatcacaggacgcccagtatgcacaaccagagccatgtcccttttgcccctgcagagttgaaggtgcaggcaaagatggagtccctggtcgtgtcatggcagccaccccctcaccccacccagatctctggctacaaactatattggcgggaggtgggggctgaggaggaggccaatggcgatcgcctgccagggggccgtggagaccaggcttgggatgtggggcctgtccggctcaagaagaaagtgaagcagtatgagctgacccagctagtccctggccggctgtacgaggtgaagctcgtggctttcaacaaacatgaggatggctatgcagcagtgtggaagggcaagacggagaaggcgccggcaccagacatgcctatccagaggggaccacccctgcctccagcccacgtccatgcggaatcaaacagctccacatccatctggcttcggtggaaaaagccagatttcaccacagtcaagattgtcaactacactgtgcgcttcagcccctgggggctcaggaatgcctccctggtcacctattacaccagttctggagaagacatcctcattggcggcttgaagccattcaccaaatacgagtttgcagtgcagtctcacggcgtggacatggatgggcctttcggctctgtggtggagcgctccaccctgcctgaccggccctccacacccccatccgacctgcgactgagccccctgacaccgtccacggttcggctgcactggtgcccccccacagagcccaacggggagatcgtggagtatctgatcctgtacagcagcaaccacacgcagcctgagcaccagtggaccttgctcaccacgcagggaaacatcttcagtgctgaggtccatggcctggagagcgacactcggtacttcttcaagatgggggcgcgcacagaggtgggacctgggcctttctcccgcctgcaggatgtgatcacgctccaggagaagctgtcagactcgctggacatgcactcagtcacgggcatcatcgtgggtgtctgcctgggcctcctctgcctcctggcctgcatgtgtgctggcctgcgccgcagcccccacagggaatccctcccaggcctgtcctccaccgccacccccgggaatcccgcgctgtactccagagctcggcttggcccccccagccccccagctgcccatgaattggagtcccttgtgcacccccatccccaggactggtccccgccaccctcagacgtggaggacagggctgaagtgcacagccttatgggtggcggtgtttctgaaggccggagtcactccaaaagaaagatctcctgggctcaaccaagcgggctgagctgggctggttcctgggcaggctgtgagctgccccaggcaggcccccggccggctctgacccgggccctgctgccccctgctggaactgggcagacgctgttgctgcaggctctggtgtacgacgccataaagggcaatgggaggaagaagtcacccccagcctgcaggaaccaggtggaggctgaagtcattgtccactctgactttagtgcatctaacgggaaccctgacctccatctccaagacctggagcctgaggaccccctgcctccagaggctcctgatctcatctcgggtgttggggatccagggcagggggcagcctggctggacagggagttgggagggtgtgagctggcagcccccgggccagacagacttacctgcttgccagaggcagccagtgcttcctgctcctacccggacctccagccaggcgaggtgctagaggagacccctggagatagctgccagctcaaatccccctgccctctaggagccagcccaggcctgcccagatccccggtctcctcctctgcctagctcttcccagaggatgtggtttggggcaggcaggtatggatcacataggatgcgatacctgtggccgtgtatgtccacatgtgtgcctgtagatacatcatcaagccctttggagcttcctaagttgctttggctgaggggagaggaaaacatggattattcactccccccatactctttgtgatacacatgtgacatgtgaaagacatacgagacatagctacatgtgatgtgcacatgtgtgaagtgcatgtatgcgtactggttgttgagctgggaaaccgtggcccaggcagtggtcactacagcctgattggtcctccaggtcagaacggtgccccacagtggtcagtccccagccctgtgggcccccacctccattcgcccagccttttattacacactctgagagtgtctccaatgcctgtcttgacaaagacagttcccagcccttgttctgttttgggtggggttgggtgcaagcaggtatttgattggtggggtttt

SEQ ID NO: 102 - DNA, 845 bp, Homo sapiens
  CDS (1)..(531)
atggagactgtgatcttaacctgtaatcctgagactccggacgcaagctacctgtggtggatgaatggtcagagcctccctatgactcataggatgcagctgtctgaaaccaacaggaccctctttctatttggtgtcacaaagtatactgcaggaccctatgaatgtgaaatatggaactcagggagtgccagccgcagtgacccagtcaccctgaatctcctccatggcctggatgccctcaccatttcttcctcatacacctattaccatacaggggaagtccccaagctctcctgtctcatagacactcacccactggcagagcattcttggctgattggtgggaagttccagcaatcagcacaagtgttcttcataccccaaatcactaaaacatatagaggggtctatgtctgtttcatccataactcagccactggtggaacaaatctcataatcaagaggatcatagtccctggtaagtggatccctggagcattggcaccatgttttccagtaaagtctatctagctgtcagggaagagccacctgctctctgcaaagggagagggaaaatcaaaacccaggaaagggaatatgtttctgctccaaaaccaccagcttctgcctgtccccttcactctttctagatcattctttagacaatacactaacaatgaacaatctgaaaggaagttaaggaaagaatttcaattcacattaacatcaaaaggaataaaatattttggaataagtttaaccaaaaaggtcaaatgattatacctttaaaaaaacaacaaattgctgaaagaaattaaagacaaaaaaaataaaaaaaaaaa

SEQ ID NO: 103 - DNA, 711 bp, Homo sapiens
  CDS (12)..(359)
acgtcggggccatggggctgggcccggtcttcctgcttctggctggcatcttcccttttgcacctccgggagctgctgctgagccccacagtcttcgttataacctcacggtgctgtcctgggatggatctgtgcagtcagggtttcttgctgaggtacatctggatggtcagcccttcctgcgctatgacaggcagaaatgcagggcaaagccccagggacagtgggcagaagatgtcctgggaaataagacatgggacagagagaccagggacttgacagggaacggaaaggacctcaggatgaccctggctcatatcaaggaccagaaagaaggtgagagtcggcaggggcaagagtgactggagaggccttttccagaaaagttaggggcagagagcagggacctgtctcttcccactggatctggctcaagctgggggtgaggaatgggggtcagtggaactcagcagggaggtgagccggcactcagcccacacagggaggcatggaggagggccagggaggcataccccctgggctgagttcctcacttgggtggaaaggtgatgggttcgggaatggagaagtcactgctgggtgggggcaggcttgcattccctccaggagattagggtctgtgagatccatgaagacaacagcaccaggagctcccagcatttctactacgatggggagctcttcctctcc

SEQ ID NO: 104 - DNA, 1402 bp, Homo sapiens
  CDS (251)..(598)
acacttacggcacgatggggcatgcgtcagttacctccgtggacatggtggaacttccgtggatatggtcgtcctgtccctgtacctggcagccttcgcactgcgcctcctcctggctgggcttgcccccatgcactgccgggacgcctcccaagcggctgcctgccactatttcaccatggctgaatgaagcgagtggcacaccgaggatccccagttcttggctgaggtgctcttcactgccaccagcatgctcagcttcacccgcctggcctacattctgccggcccacgagtcgctgggcactctgcagatttccattggcaagatgattgaagacatgatccgtttcaatgagacgtttcagtttctgttctggaccatgttcggtatggaagagcacagcgtggtggacgtgcctcagtttctggtgcccgagtttgcaggccgggccctctatggcatctttaccatcatcatggtcattgtgctgctcaacatgctcattgctatgatcaccaactccttccagaagattgaggatgatgctgacgtggagtggacgtttgctcgctccaagctgtatctgttctacttctgagagggcctgacactgcctgtgcccttcaacatcctgccctcctcgaaggctgtcttctaccttctcaggagaatttgccagttcatttgctgttgctgttcctgctgcaaaaccaagaagccagactatcccccgatccctacttttgccaatcccagggcaggggctgtgcctggggagggagagcgtggatcctaccgccttcacgtcatcaaggccctggtacagcgctacacagagactgcccggcgagaattcgaggagacccggcggaaagatctgggcaacagactcacagagctgaccaagaccatatctcgactgcaaagcgaggtagccggtgtgcggtgaactctggcagagggagggacaccccggcctcccgacggtgccagcgtcctcagtcactacatcactcaagtgcacaacagcttccagaacctggggcctcccatccctgagaccccagagctgacagggcctgggattgtgaggacccaggaatcatcaggaaccgggcttcaggacactggaggggtgaggactctggcttccggagagtctggcccctgctccccagctcatgtgctagttcatagggagcaggaagcagagggggctggggacctgccccagggggaggattcggggactgagaggaggtcctgatacagtggaagagtcccttcttctgttgctgagcgtggtagcctaggagggtgagggtggggggccccttgggaggagcctgtgctgcttttcttgcttcaataaagtttctgctctggaaaaaaaaaaaaa

SEQ ID NO: 105 - DNA, 1786 bp, Homo sapiens
  CDS (122)..(838)
acctgtcgccatccccggctccctgcccagagcaccatcgctacactcgccatcctctgcgtccacctcgccgctcggttcgctgtcccagcccctcccagggccggtgggctcctcagccatgacgcctccccagcagccgccacccctgcgttcagagccgggcacactgggctctgcagcctcatcctacagccccctaggtttgaacggtgtccccgggagcatctgggactttgtttccggcagcttctcccccagcccctcccccgtcctgagtgccggccccccatcctcttcgagtgcaagtccaaacggagctgagctggcccgggtcaggcggcagctggacgaggccaagaggaagatccggcagtgggaggagtcctggcagcaggtgaagcaggtctgcgatgcctggcagcgagaggcgcaggaggccaaggagcgtgcccgtgtggccgatagcgaccggcagctggcgctgcagaagaaggaggaggtggaggcacaggtgaagcagctgcaggaggagctggagggcctgggcgtagcctccacactgccggggctgcggggctgtggggacatcggcaccattcccctgccgaagctgcactcgctgcagagtcagctgcgcctggacctggaggcggtggacggcgtgagtcctgctctgggcagggtgatcttccagctccgcgccaagcagtgtgtggcctgccgggagcgggcccacggtgctgtcctgcggccctgtcagcaccacatcctctgtgagccgtgtgcggccaccgcacctgagtgcccctactgcaagggccagcccctgcagtggtgacctcagcggggacagccacctcctgctgggcaccctggctccagcgctcctcctgaccacggacatgtcgtcactcgcttctggtgccaccgacgtgaggaccgaggctgggagcccttcctgttacacgttatcatgaggctgggagccccgcctgcgcttggcctgacagcctttcctgtcacacgttgtcacctatctagtcctaccgacggtttcaaggtattttcctcaaaaaccttaaatgcaaacccacagaacccgcctgcctgtccctgaggggcctggtgcctccgggatccacgcggcgctgtgatcacagcagtttgtggtcctgacactactgtgactaggccactgggagctggggtctttcaaagcactttgtaaaccgaggaatttagttagaggttataaattgctctaagctgctttctgtttttttttaatatgcgataatatgaagctttatatgtgtactgtgaacttaaatatttcatatcagtttattgtcaattcatagtatgctaaatatattagatttcatattctgaaactagtacttatgaaatgagtgtttatctagtagtaagacctaggatttttacattttccaattaagtgcaaatagtatttataagcagagtgattatggattgagatgtttttaacttgatggaaggagctagttttcctgagcctgtgtgtgcaccaggcactggggctgatgttccagcctcgtggcgtgggagcaggagagctccgtcctgcatttctgtggtccgtggccgctgtttctgtgcgcctgcgcctcggagagcaagtgaaggagcatcatgggttttgttttctcccttaaccctctgaaagacagtttgatactaacaaaaaacgcagcagaggggatccaacgtcagagcttttagaattacttttttaagcagc

SEQ ID NO: 106 - DNA, 887 bp, Homo sapiens
  CDS (237)..(410)
tgtggagctctgggttgctcttagtactgctgccagaaacactgttagaatggcaaccctgccattctcccctccagtggaagattctactttattcaggaaggctggtggcttgcaggggctaggcttacacaagccagccaagattgagaaggtaggggagtgctttcaatggaggccatagttgtcatcttttcttctgagcaggctctaggacaaacaatgagcaaattgagatgtcctgtattgggaggatgaggctgatatgtttcatcattctcagaatttgggggctagagcacctttttgggaatatgggcctagggaaaagaacggtcacttacctggacactatggccatagtcttgagtttttctagtcagcatgtgattggttgtaccttaagtttatgacaccaaaaatactattaactctgttatttttgttcttaatcccatctcaaattagtttctagagttagaatcagaacacaaggatgctcattttcacatggagggaaagttgccaaagcatttaaaaaataaccccaaaagtatatctagcagtgaagcttggtagataaaggtgaactgctaaacagacactggcgtgccacactcctgccagggcagtctcattgtgtgtgacggtgctgcaacactgccagtattacttgagatgcagtctctctcccctgttctcagttcctgggctcagccctcctccaaggcctgccagtgagtagcagtttggaaggcaggccaagggagatccccaaaagtttaagttactctggtgggtcccgcaaaaatttaacggccaggttttaaggacacttagtggttagaaaacagcgtgagttaaatgttcccacctcggcaccggtg

SEQ ID NO: 107 - DNA, 689 bp, Homo sapiens
  CDS (63)..(242)
tcagaatttcttttaatgctacacatatataagcaaataatgtttttaagaagctaaccttgatgttaagagtggcaggtgttctccagtttttacctctttcatatgggaccaaagtagctagtttatggaacacatatgaaaatgtggttatgccaccaagttttactactacacttgtcttaccacttttaagtcatgaattctataattattcatacccctttgcctgtgatcagaagtaacttttaaaattatcacttgactttggatggaactagtataaaggcaggaattttgtctttcagtggagatttattctgttcaaggttgaagtggacacatcattatcttgggatggtacttctttatttaaatagtcctttaaagttctttgagtggcagagaacgtttttggtttcagtctgagaaggctaccaaatggtttaagttcatttcatagttaggagaaaaagattttgagtagtctaatgtcgtcagaaaggattaaaacgttgtatgtaccaagaaggcagaatgaagaaggatcacgttcacaaatgctgtatgtttaacaaaatacgtttagatggtaatatccaatagtcttatcaagtgctacaatctttttaaacagggaatggccaaatccagtgctattgaaacagcctgaagaatgcaatcttaat

SEQ ID NO: 108 - DNA, 1813 bp, Homo sapiens
  CDS (814)..(1161)
gcttgcgacgaggaaaggaatatggaaccagtatgaattaaaatttgtgttttcttcaacattccataacatcactaagaaataaaaaattataaaagctacatggttaaaaagtaccatgctggccaagcgtggtggctcatgactgtggtcccagcactttgggaggctgaggtgggaggaaggctggagcccgggagtttgaggttgcagtgagctgtgatcacaattgcactacagcctggacgacagagtgagaccctgtctcaacaaaaagtacaattgtttgaaagaatgtatacatgttttttactttttagtgaaatatattgtttttaaacattccttggtagagagaatttttttgttggataaaagggaggtatttttgttaaggatatctgggcaccctaaaaatttcatactttatgtccactcattaccgtatgggagaaaagttgctaccataaagtatgtggtttgtaggagctcctaaaataaaactcttcagttttccaccctgaagtcagcttttggtcataccagattatgtacatatgtagtgggttcatgccatacttttagaaggccagcagagggagcactactcaatgtacagtgtttactgtactgctgagaagactagtattttctatggctcagtacaaaatgaaaacaaaattaaatttcacaactcctcaaaacaaaaccaaaacaaaatttttcattttattcgtgggttcaggtttcagacatgctatttattagtgactgagcagattattttatttctgtgtacttttttgcctatatatgaagactactcaattaccctattttagagggttggtttgtttgtttgttttgcggcagggtctcactttgtcgtccaggctggagtgcagtggcatgattgcagcttgctgcagcctcaacgtcccgggttcgacggattctcccacctcagcctcccgagtagttcggactacaggtgtgcgccaccacacccagctaatttttgtatgttttgtggaaatgtggtttcactatgttgcccaggctggtcttgaacccctgggctcaagtagtcctcctgctttgtcctcccaaggggctggaattacagatgtgagccaccataccccgttagagttgtgtttttagatttttaagttattatggatacatcctagttgcacatatttttgaggtagatgtgatattttgatacaagcatataatatgtaatgatcaaatcagggtaattggagtatccattgcctaaagcatttatcatttctttgtgttgggaacattccaattccactgtcataattgttttgaaatatatagtaaatgattgttaactataattgccctatagagttacgttgtcagtcctacttagtggccctagcaaagaggaagaaacatagtaatttacgcaaattcccggtggaaaattagagaaagtttagagaactaaattagtgtaaaacttaaaagtatttctgactataaattctaccattaaaaacaaaaaagcacccgtgaacccacaaggataaaataatgtgtttgtccctgcccttccttgcatatcctgggtgaggctggttgatggtacattgttgtagaataattgcggaattttatttacctggaagtttgctgagaaaacaatgtctgaggtggtgtaagtttttggaaagcaaacatttgacagagttctcataattgattttcattttccaccctttattctgttaaagttctgaaatattgcataaggccattctgaaaaaaaaaaaaa

SEQ ID NO: 109 - DNA, 1508 bp, Homo sapiens
  CDS (191)..(1321)
gggcaggaaagcgtggctgtgttgagcagaacccggtgcaaaacggaaagggtcaaacactttggccaagaggaggatatccagaaaatccaaatgcctcttcctcttgatcttctccagctccccctccttctgtagttgagccttcctcagttggatcacttggtctgtccacctggatgctgccctgatggctgaaggcacacttcatgatggtgtccagggtcatcaaggagacgtgctgaaagacctccagaggggaatcctggccaaggagctcttcccatttgtcctggcgttcgtgttctgcctggccctggggctgctgcaggccattaagctgtacctgcggaggcagcggctgctgcgggacctgcgccccttcccagcgccccccacccactggttccttgggcaccagaagtttattcaggatgataacatggagaagcttgaggaaattattgaaaaataccctcgtgccttccctttctggattgggccctttcaggcatttttctgtatctatgacccagactatgcaaagacacttctgagcagaacagatcccaagtcccagtacctgcagaaattctcacctccacttcttggaaaaggactagcggctctagacggacccaagtggttccagcatcgtcgcctactaactcctggattccattttaacatcctgaaagcatacattgaggtgatggctcattctgtgaaaatgatgctggataagtgggagaagatttgcagcactcaggacacaagcgtggaggtctatgagcacatcaactcgatgtctctggatataatcatgaaatgcgctttcagcaaggagaccaactgccagacaaacagcacccatgatccttatgcaaaagccatatttgaactcagcaaaatcatatttcaccgcttgtacagtttgttgtatcacagtgacataattttcaaactcagccctcagggctaccgcttccagaagttaagccgagtgttgaatcagtacacagatacaataatccaggaaagaaagaaatccctccaggctggggtaaagcaggataacactccgaagaggaagtaccaggattttctggatattgtcctttctgccaaggatgaaagtggtagcagcttctcagatattgatgtacactctgaagtgagcacattcctgttggcaggacatgacaccttggcagcaagcatctcctggatcctttactgcctggctctgaaccctgagcatcaagagagatgccgggaggaggtcaggggcatcctgggggatgggtcttctatcacttggtaagatctgcacccctaaattttcctgctagttttccccctgagattttgctttattttttgcgctggtaccttagtgaccctagtgcctcaggatatgtgtaggtgaaacagaagaagtaggctacttttctgttctttctaaagagagctccaaattattctcttgtctttcaggaaaaaaaaaa

SEQ ID NO: 110 - DNA, 830 bp, Homo sapiens
  CDS (164)..(649)
tttcgtatttccgttaggacatcgctgaaacacagactgggatcaaactgtgctcatagtcctaaggatctccagcaccctgccggtggcactactgagagacgaggtgccagggtggttcctgaaagtgcctgagccccaacttatcagcaaggagctcatcatgctgacagaagtcatggaggtctggcatggcttagtgatcgcggtggtgtccctcttcctgcaggtctgcttcctcaccgccatcaactacctgctcagcaggcacatggcccacaagagtgaacagatactgaaagcggccagtctccaggttcccaggcccagccctggccaccatcatccacctgctgtcaaagagatgaaggagactcagacagagagagacatcccaatgtctgattccctttacaggcatgacagcgacacaccctcagatagcttggatagctcctgcagttcgcctcctgcctgccaggccacagaggatgtggattacacacaagtcgtcttttctgaccctggagaactaaaaaatgactccccgctggactatgagaacataaaggaaatcacagattatgtcaatgtcaatccagaaagacacaagcccagttttctggtattttgtcaaccctgctctgtctgagccagcggaatatgatcaagtggccatgtgaattccaaatatttttaatggggtccagttctctatggattcttacatttaatttggagggaaatgccatttttcccccttaaacaaggcatggggctcacaagtctatggagacaggccaaaaagaatgtggagaagaaaactgata

SEQ ID NO: 111 - DNA, 3517 bp, Homo sapiens
  CDS (196)..(654)
atagaaagccgctcgccagtagaaagccgtacgcacgcccgaccggaccggaattcccgggccacgattgcgtgtcctcggagcaggcggagtgaagggacttgagcgagccagttgccggattattctatttcccctccctctctcccgccccgtatctcttttcacccttctcccaccctcgctcgcgtagccatggcggagccgtcggaggccactcagtcccattccatctcctcgtcgtccttcggagccgagccgtccgcgcccggcggcggcgggagcccaggagcctgccccgccctggggacgaagagctgcagctcctcctgtgcggattcctttgtttcttcctcttcctctcagcctgtatctctattttcgacctcacaagagggattgagctctctttgctctgatgagccatcttcagaaattatgacttcttcctttctttcatcttctgaaatacataacactggccttacaatactacatggagaaaaaagccatgtgttagggagccagcctattttagccaaagaaggaaaagaccacttggatcttctagatatgaaaaaagatggaaaagcctcaggggaccagcaacaacgtatcagactcttcagtttctcttgcagcaggagttcattgtgaccgtccttctattccagccagtttcccagagcatcctgcttttctctcaaagaaaattggtcaagtggaagagcaaatagataaagagaccaagaacccaaatggggtatcaagtagggaggctaaaactgcattggatgctgatgacagattcactttgctgacagcccagaaaccacctactgagtactctaaggtagaaggcatttatacatattctttgtctccatccaaagtttcaggagatgatgttattgaaaaggattcccctgaatcaccatttgaagtaattattgacaaagcagcatttgacaaagaatttaaagactcatataaggagagcacagatgattttggtagctggtctgtgcacactgataaagaatcatccgaagacatttcagagactaatgacaagctttttccactgagaaataaagaggcaggacgttacccaatgtctgcattgctcagtaggcagttttcacacacaaatgcagcactggaagaggtgtccagatgcgtgaatgatatgcataactttactaacgaaatactgacttgggatctggttccccaagtgaaacaacagaccgataaatcttctgactgcatcacaaaaactacaggacttgacatgagtgaatataattcagaaattccagttgtaaatcttaaaactagcactcatcagaaaactcctgtatgttctattgatgggagcactcccatcactaaatcaacaggtgattgggcagaagcatctctccagcaagaaaatgctattactggaaaacctgtacctgactctttgaattccacaaaagaattcagtatcaaaggtgtgcaaggcaatatgcagaaacaggatgacacacttgcagaattacctggatctccacctgagaaatgtgactctttgggttctggagtggccacagtgaaagtggctttacctgatgaccacctgaaagatgaaatggactggcagagctctgcattgggagaaatcacagaagctgatagttctggtgagtctgatgacacagtaatagaggacatcacagcagatacatcatttgaaaataacaaaattcaggctgaaaaacctgtttccattccaagtgctgttgtaaaaacaggtgaaagagaaatcaaagagattcccagttgtgagagagaagaaaaaacatctaaaaactttgaagaattggtcagtgactctgagctgcatcaagatcagcctgatattcttggaaggagtccagctagtgaggcagcatgttcaaaagtacccgatacgaatgtctccttagaagatgtgagtgaagttgctcctgaaaagcctattactactgagaaccccaaacttccttcaacagtgtctccaaatgtttttaatgagacagaattctcattaaatgtgacaacatctgcctatttggagtcattacatgggaaaaatgttaaacatatagatgattcctccccagaggacctgatagcagcctttacagaaaccagagataaaggaatagtagatagtgaaagaaatgcttttaaagcaatatcagagaagatgacagactttaaaacaactcctcctgtagaagtcttacatgaaaatgagtccggtggttctgaaattaaagacattggaagcaaatacagtgaacaaagcaaagaaacaaatggaagtgagcctctaggtgttttccctacccaaggtactccagtagcatctcttgacttagaacaagaacagctcacaattaaggctcttaaagaattaggtgaaagacaggttgagaagtcaacttctgcacagcgtgacgcagaattgccttctgaagaagtactgaagcaaactttcacatttgctccagaatcttggccacagagatcatatgacatcctagaacgtaatgtcaagaatggatctgatcttgggatttcccagaagcccatcactatcagagaaactactagggtagatgctgtttccagccttagcaagactgaattggtaaaaaagcatgtcctagcaagacttctgacagacttctcagggctgagctttccactggcccataaagcagaaggagggggcccaaagtcagttgggcgtttctgctggcgtggagagcgctaccaggtgcccccggattttgatcgggagtcgcttttgcctttccgtggacaagccttcctccgccagcagatgccccgggcaggaagagaagcggtggtgcacgatctgattttctggagagatgtgaagaagactgggtttgtctttggcaccacgctgatcatgctgctttccctggcagctttcagtgtcatcagtgtggtttcttacctcatcctggctcttctctctgtcaccatcagcttcaggatctacaagtccgtcatccaagctgtacagaagtcagaagaaggccatccattcaaagcctacctggacgtagacattactctgtcctcagaagctttccataattacatgaatgctgccatggtgcacatcaacagggccctgaaactcattattcgtctctttctggtagaagatctggttgactccttgaagctggctgtcttcatgtggctgatgacctatgttggtgctgtttttaacggaatcacccttctaattcttgctgaactgctcattttcagtgtcccgattgtctatgagaagtacaaggatgcacgtgtgctagcgctgagcaggcaagagtcccacactgaagtatcagagaagctccagggcaaaaagcaagaggcaccagacccagatgatcactatgttggcatcgcccgagatcagaccaagtcaattgttgaaaagtaa

SEQ ID NO: 112 - DNA, 7057 bp, Homo sapiens
  CDS (1700)..(6637)
catcggatacccggctcacgacttcgtcctctcccccctttcctcacgctggtggtgttcctttcctcagtcctgctgatgtcctccagctgattccaggctgttcccggccacccctgaggccgtcctttcgcttcttgtaaaagcctccccgcctcctgagctccctcggtcgcctcccgagaagccaacgggcctctctggtggagcgctaggttgacagcgttttagcaggaccgcgagaaaccggggagatcctcttacgaggaaaaactccaagattacatccctgttatctttcctccaagtagtttctgatcataagttatttgtttaaaaatgatgttttaattagaatttatttgatggcttttaaaaaacttttactgacactcaacatgtttgtttttgtaggaactgactaaggctttggaacagaaaccagatgatgcacatatattatcgtcaaagagcttattgtcacattcttcttgggaattactgtggtgaaatgctcattgcagtgctgcaaaaaggtgaggtcacaggacacaaacccatatctgagacctggatgccttcctccacgcactcacccactggctgtcctgagcatcaccctgcacctattgtcacagcaacaagggaaaaatcagcagcacgctgcgtggctgctcgttggctacttacgacggaagctcggttggggtttctgcagaagtttcccccttgggcggtggcggagctgataagcgcgctagtagcagctctggcagaagcaacggtggcttcgagggatggcggcggctgcaacaggacctgcagcatcccagaggaactgactaagactttggaacagaaaccagatgatgcacaatattatcgtcaaagagcttattgtcacattcttcttgggaattactgtggtgcagatgctaatttcagtgactggattaaaaggtgtcgaagctcagaatggctcggaatctgaggtgtttgtggggaagtatgagaccctcgtgttttactggccctcgctgctgtgccttgccttcctgctgggccgcttcctgcatatgtttgtcaaggctctgagggtgcacctcggctgggagctccaggtggaagaaaaatctgtcctggaagtgcaccagggagagcacgtcaagcagctcctgaggataccccgccctcaagagaaaaaaaagtcttggttccaaaccaggatatatgagtgggatccctgctttcaatttccaagcagaatgattggaaccattgtgttggcattcatctgcctgtatcttttcattgtcatcgagttctgcgtgtttgtgtacgtgagagatgagttggatgtgcttgaaaacaacctggaaagctacatcaccttcacgaaccattcaggggtcctgaccccagtcatcctgcaggtgaaagagctgatcagtgtcaccaaaggagtctgggtggcgaccattttgcccgcgtatctcacgtgtgtgagctatctgttccacattttggtctgttacagaaagcacatgaagaggctatgggcaggagataaacattttcttcctttgaagttccataacccggcctcgtcggagagcatggtggccattgcaaggtactctggctggcaaatagcctatattctgtggggctacctcatcattcacatggtacagagcctatgtggcatggcaatcatgtacagcctggtgctacccatcgtccaaaccagggcctggaaatgctgcaagggctgggcattgggatgaaagcgttccacaacttcaactactttctgttcttctacaacgtgctgctgggcctgggtgcctgcctttccaggctgctcatcagttgcctcctcggcatgtggctgattgcccgcatcgacaggaccatcatgcagagtggctatgagggagcagacatggggttcagtgcatggattgggatgctctacatggaccattatcacatcaaccctgtgcttgtcagcttttgccacatcctgatcacaaatcacagggagaagaagctgcagcagagcaccaaatactggtgcctaaatcaatcggcagagtcccttcggatttgcgccatgcgcggcggggagaaccggcctcctgctcgagttcagagctcatctgaggaattggaattgagacaccaaagcctagacgcgtttcctggacgacggcttcccggcaggggcatccagccagcggccaagatgtcgtcagtggggaaggtgacccaggttccgaatgggaaagcctaccagcagatcttccaggctgaggtgcagctggtccactccctggcggccaccaggaagcgggctgcagagcgttctgtgaccctgaagagtggcaggatacccatgatgaagaaggtggagactcctgaaggggaggtgatgtctccccgacagcagaagtggatgcacagcctccccaacgactggatcatggaaaaccctgttctccacagggaaaaggaaagagccaagagggaaaaagcccgagagagtgagaacaccatcgctgcccgagaagtgcggggtctcatggatactatagttcctgagaagataagcaccagcacctttcaaaggcaagcagaacacaagaggaagagctacgagagcgctctggccagctttcaggaggagattgcgcaggtgggaaaggaaatggaacctctcatcgtggacacagggggactttttttgaagaagctgactgagtctgatgaagaaatgaaccgtctcttcctaaaggtggaaaatgacaccaaccttgaggactacaccatccaagccctgctggagctgtgggataaggtggccgggcggttactgctccggaagcaggagattaaggagctggatgaggccctgcactcgctggagttctcccgaaccgataaactaaaaagcgtgttgaagaaatatgcagaagtcatagagaaaacttcctacctcatgcggcccgaagtgtacaggctgataaatgaagaagccatggtcatgaactatgccctgctgggcaaccggaaggctctcgcccagctgtttgtcaacctgatggagtccaccctgcagcaggagctggacagccgccaccgctggcaaggcttggtggacacctggaaggctctcaagaaggaggccctgctgcagagtttcagtgagttcatggccagtgagagtatccatactcccccggctgtgacgaaggagctagaggtcatgctgaagacccagaacgtcctgcagcaaaggcggctgaagcatctctgcaccatctgtgacctcctgccccccagttacagcaaaactcagctgactgagtggcattcttccctcaactccctgaacaaggagctagacacctaccacgtggactgcatgatgtggatccgcctgctgtatgagaagacatggcaggagtgcctgatgcatgtgcagaattgtaagaagcagctgctggactggaaagccttcactgaggaggaggcagagaccctggtgaaccagttcttcttccagatggtgggagcactccagggcaaagtggaggaggacctggagctcttggacaaatccttcgagactctggcagatcagacagagtggcagagttcgcacctcttcaagtatttccaggaggtggtacaactgtgggaggcacaccagagcgagctgttggtgcaggagctggagctggagaagaggatggagcagcaccggcagaagcacagcctggagagccaggtgcaggaggcccacctcgataggctcttggaccaactgaggcagcaaagtgacaaagaaacactggcgtttcacctggaaaaggtcaaagattatctgaagaacatgaaatccaggtatgaatgttttcacaccctcctgacaaaggaagtgatggagtacccagcgatcatgctgaaagaactcaactcctacagctctgccctcagccaatacttctttgtgcgtgaaatctttgaacagaacttggctggagaagtcattttcaaattcaggcaaccagaagcacatgaaaaaccctcccagaagagagtgaaaaaactgaggaagaagcaagggtctaaagaggacatgaccagaagtgaggaaagcataagtagtgggacaagtactgccaggtcagtagaagaggtggaagaagaaaacgatcaagaaatggagtccttcataactgaagaggtgctggggcagcagaaaaaatctccactgcatgctaagatggatgagtccaaagaaggctctattcagggactggaagaaatgcaggttgaaagagagggctccttaaacccatccctgaatgaggagaatgtgaagggtcaaggagaaaagaaggaggagtcagaggaggaagatgagaaggaggaagaggaggaggaggagaagctggaggaagagaaggaggagaaggaggcacaggaagagcaagagagtttatctgtgggtgaggaagaagacaaggaagagggtctagaggagatatactatgaggacatggagtccttcacaatctccagtggaaacacttattttgtctttgtacccctggaagaagagcattgtaggaagtcccattccaccttctcagccatgttcatcaacgacacttccagtgccaagttcatagaacaagtgacaattccatcgagactaattttagaaattaagaaacaattgttttcagagggaggcaacttttctcctaaagaaatcaattcactgtgttcccgactggagaaggaagctgcccggatagagttggttgaaagtgtcatcatgctcaacatggagaagttggagaatgagtacctggaccaggccaatgatgtcatcaacaagtttgaaagcaaattccataacctgtctgtggaccttattttcatagagaaaatccagcggttgctgacgaatctgcaagtgaaaatcaagtgccaggtggcaaaatccaattcgcaaacaaatggattaaatttctctctgcaacagcttcagaacaagataaaaacttgtcaagagtccaggggagagaaaaccacagtgaccacagaagaactcctcagcttcgtccaaacttggaaggaaaaactgagccagaggattcagtaccttaactgcagcctggacagggtgtccatgactgaactggtctttaccaacaccatcctgaaggaccaggaggaagacagtgacatcctgacatcttcagaagcccttgaagaggaggccaagctggacgtggtcacccctgagtccttcacccagctgagccgcgtggggaagcccctgattgaggacccagctgtggatgtgatcaggaagctcctgcaacttcccaacacaaaatggccaacccaccattgtgacaaagatccgtcccagacaggcttcaagcgacatcggtgccagccagaaaactctgggaagaaggctgtacccagtgccagtgctacctctgcaggcagcctccagaccacccacccacctttgtcccacagcttcacaccgcaccccaagcccaacaaaatggagagaaagtaccgggtgcttggggacaagcctccccctgctgccgaggattttaaggggatcatcttgaccctcctctgggagagcagtgagaacctgctgacagtcgcagaggagttctaccgtaaagaaaaacgcccagtcaccaggcctgactgcatgtgtgacacctttgaccagtgcgccgagaacattagcaaaaagatcctggagtatcagagccaggcaaataagtaccacaactcctgcctcatagaattacggatccagatcaggagatttgaggagctgctgccccaagtgtgttggctggtgatggagaatttcaaggaacaccactggaaaaagtttttcacctctgtgaaggagatccgaggacagttcgaggaacagcagaagcggctggagaaaagaaaggacaaaaatgcccagaagctccatctaaatcttggacaccccgtacatttccaagaaatggagtctctacacttaagtgaagaggaaaggcaggaagagctggacagcatgattaggatgaacaaggagaagctggaggaatgtaccagaaggaatggccaggttttcataaccaacttggccaccttcaccgagaagttcctactgcagttggatgaggtggtcaccattgacgatgtccaggttgcaaggatggagccccccaaacagaaattatcaatgctcatacgaaggaaactcgctgggctctccctgaaggaagagagtgagaaacccctgattgaacgtggaagcaggaagtggccagggatcaaacccaccgaagtcaccatccaaaacaagattcttctccagccaacatcatcgatttccaccaccaaaaccaccctgggccacctggcggccgtggaagcccgagatgctgtgtacctgaaatatttagcatcatttgaggaggagctaaagaggatccaggatgactgtacatctcagataaaggaggctcagcgctggaaggacagctggaagcagtccctgcacactatccaaggcctgtatgtgtgaccctccgccccaccatgaataaacactttcttatacagactccttccctgtccatctacctgcctacctactttccgtccatccctccctcccttcatccctccacccctgctctgtgccgggcactgtagctttaccagcgaacaggacacagcatggtccctgcccacgtggagccctcttcccatgaggaaggcaagcatgaaaggggaattccacgtggttagcagggagggtgagtaccaggaatcagtcacttcaaataggcaccagagcttcaaaggacatcacctccaaacagcatgctgggcagggcacgtcatcttgaaaaatgaaataaaggtcatgggaaaatgatattttaatttaacagaataaacaagtatgggttataattgcaaaaaaaaaaaaaaaaaa

SEQ ID NO: 113 - DNA, 1170 bp, Homo sapiens
  CDS (755)..(898)
  misc_feature (1)...(1170): n = a,t,c or g
gaaacccaacccaaagaattatcaataaaaattttcaacctaaaagttcatctttggcaacttaaaacctaaaaattgaaacttgtccggtaaaacactggcccaacgcctgaaagcaaacccatccactgagggaaaacaccggccaagctggacagtaatgccccagaacagtagcagtaaataaaggtgaatcctgcaaagacgaggctgctcaccctccctctctctgctgtgtcaacacccacagagactctggaggagagaaaacatacctctctctcccaggcctttcccacacacactgaggttgagaagctgggaataaacagcgtccaacacttttaaatggcggtggcagctccagacaagggagaagggaaggactgagagaagaaattattagactttttagactggctgaacccagaacctttacattggttacaaaatcatgcctggaggtgaaaaattcaatagcattataccaagtgtttgggcaacggtgtagagacaatagtagagacaagctacagctttagacagtggtagagagaagctacaactttagcttgtagaaacagctgttgggtgttcagcagatgcagtctaggtgcatgcaaacccactgtgtgcagcatgccttcactctcacgacaagggagccagaccttgtgtctgcggctggctgaatattgcatggaatctgtggattcacagaggcttcttctcagctaagagggagtgtggctggatgcatttctctgtggctcattcaatttggggtatactcatactactgagtctctatgaaggagtgataagctgggtcttcaatttccaaatgtttaccaaactcctactatgtgccaagcactattcccactgctttgagagctaacggtaaacaacaacagtgaaaaaacatgtaacatcccaaccagtgcttctaaggatttaaaatatgctggtacttatgactntattcttacttctggattatagatatgtatatggctttggggatagnggtttgccacctttttggcccctttttccccccccccctttttttttttaaatgggccaaggccacccaactctggaaaatttattttggcgccaaaattttggaaaccccccccaaaaatttttttttctttacaaatt

SEQ ID NO: 114 - DNA, 993 bp, Homo sapiens
  CDS (76)..(282)
agtctttttttttttttttttttcctgattcttcatcattcaacttgagattattctaatcttgatttgattctcatgctcctttcaaaagagcatactagtttggggtggttggttattttcttaaccttagcaagccagcttatttcctatggaagcagaactggaaacagcagatgtccaccatgcttatacaggacactacacactgtctcgacaagccatgttctttcctccctcttcgtgagcactttctctggtgatgagttagtatggactacttgaacctcaaaactgggcctctcacccaaagccaaatgaagtagcgtatgccaggatgatgtttcttttgggccgttggcagtgagactgctaagcaggctgccttaggttttgctgtggcaatgctagcagattgttccctctttcaaaggggcaaaaatatcattttggtatgataactgactttctatttacagtttctggcccccaaagacaaaccaagtggagacacagcagctgtatttgaagaaggtggtgatgtggacgatttagtaagtacttttaatatgcacctggtgttctgtgattgaagtcacctgagctgtaaatacagccacaaaggctgattatcttacacttgttgcttatttgtgttttaatttccaatacaccagaagcttcctacaccattatatattgccattataaattcaatcagataggtaatttcataatagaaattcctgtgtttcatggtgtcggctatattgttcattcagattaatcctctcccttgaagggctgaaaaagagctagggaggctattccattagtagcaaaatgttgtaattcactgaaattgctgttaaccaaaaataagtaatacaacatgcagtttgtgtgggttgacaaatgaaacagcccttaaaagggctacttcttaaatgttctcaattaacttaatgtaaacaaaatagacctgatagagcc

SEQ ID NO: 115 - DNA, 3748 bp, Homo sapiens
  CDS (270)..(2726)
actcgctctctgttcatgcctccattatgcactgtcgccgtttcctcctgaaccgtccgcgcactcgcatcatctagtcgctcatcaatagccacccaggctacctttaagctccggctcgcagtcgtgcgcatcggagccaccacacttcacctcggaacactatccatcatgacgcattaatccattcccataaggaacttggccccccaggcacagattccgcacgaggagacagctgagcttgagcacttgagaacctggatgatatgctcgcacccgccgcagagccaccgctgcggcgagacatcgcagacgcagactccagagccgccaccgtcctacagaggcccaccagtcggaggatcacacccaccgagattagctcattgtttgaacgccagggcctcccaggcccagagaagctgccgggctccttgcggaaggggattccacggaccaagtctgtaggggaggacgagaagctggcgtccctgctggaagggcgcttcccgcggagcacctcgatgcaagacccggtgcgcgagggtcgcggcatcccgcccccgccgcagaccgcgccgcctcccccgcccgcgccctactacttcgactcggggccgcccccggccttctcgccgccgcccccgccgggccgcgcctacgacacggtgcgctccagcttcaagcccggcctggaggcgcgcctgggcgcgggcgctgccggcctgtacgagccgggcgcggccctcggcccgctgccgtatcccgagcggcagaagcgcgcgcgctccatgatcatcctgcaggactcggcgcccgagtcgggcgacgcccctcgacccccgcccgcggccaccccgcccgagcgacccaagcgccggccgcggccgcccggccccgacagcccctacgccaacctgggcgccttcagcgccagcctcttcgctccgtccaagccgcagcgccgcaagagccccctggtgaagcagctgcaggtggaggacgcgcaggagcgcgcggccctggccgtgggcagccccggtcccggcggcggcagcttcgcccgcgagccctccccgacccaccgcggtccgcgcccgggtggcctcgactacggcgcgggcgatggcccggggctcgcgttcggcggcccgggcccggccaaggaccggcggctggaggagcggcgccgctccactgtgttcctgtccgtgggggccatcgagggcagcgcccccggcgcggatctgccatccctacagccctcccgctccatcgacgagcgcctcctggggaccggccccaccgccggccgcgacctgctgctgccctccccggtgtctgccctgaagccgttggtcagcggcccgagcctggggccctcgggttccaccttcatccacccactcaccggcaaacccctggaccccagctcacccctggcccttgccctggctgcccgagagcgagctctggcctcccaggcgccctcccggtcccccacacccgtgcacagtcccgacgccgaccgccccggacccctgtttgtggatgtacaggcccgggacccagagcgagggtccctggcttccccggctttctccccacggagcccagcctggattcctgtgcctgctcgcagggaggcagagaaggtcccccgggaggagcggaagtcacccgaggacaagaagtccatgatcctcagcgtcctggacacatccctgcagcggccagctggcctcatcgttgtgcacgccaccagcaacgggcaggagcccagcaggctggggggggccgaagaggagcgcccgggcaccccggagttggccccggcccccatgcagtcagcggctgtggcagagcccctgcccagcccccgggcccagccccctggtggcaccccggcagacgccgggccaggccagggcagctcagaggaagagccagagctggtgtttgctgtgaacctgccacctgcccagctgtcgtccagcgatgaggagaccagggaggagctggcccgaattgggttggtgccaccccctgaagagtttgccaacggggtcctgctggccaccccactcgctggcccgggcccctcgcccaccacggtgcccagcccggcctcagggaagcccagcagtgagccaccccctgcccctgagtctgcagccgactctggggtggaggaggctgacacacgcagctccagcgacccccacctggagaccacaagcaccatctccacggtgtccagcatgtccaccttgagctcggagagcggggaactcactgacacccacacctccttcgctgacggacacacttttctactcgagaagccaccagtgcctcccaagcccaagctcaagtccccgctggggaaggggccggtgaccttcagggacccgctgctgaagcagtcctcggacagcgagctcatggcccagcagcaccacgccgcctctgccgggctggcctctgccgccgggcctgcccgccctcgctacctcttccagagaaggtccaagctatggggggaccccgtggagagccgggggctccctgggcctgaagacgacaaaccaactgtgatcagtgagctcagctcccgcctgcagcagctgaacaaggacacgcgttccctgggggaggaaccagttggtggcctgggcagcctgctggaccctgccaagaagtcgcccatcgcagcagctcggtgagcagggcggtgcggggagggatccgtgccttgtccgtggccccgtctgtcattcctcttgtctgttctctggctctcctgttcctccttgttctgttccattccttctgtggcaacccccaacccgcccccgccatccacctctgaatctggtcttgcttggcctgcccgagagaggaggttcttctgggcgtctgacacgtcagggttgctgctcactgtgtccctgttggtgccagaagtgggagctgggctcccctcagagactcaggttgggcatgaggcgcctccatggccctcctggaggctcttggccccagggattcctgtgagttctctctctccctcccgacacaggctgtctttaccattaagggttgttttgtgttttactttggaggtacgcctccctcctcccatcctctctgtggccatgtggctgcccagtgtggctgataccctctgccttacagctgcctcctgccttgcttcctctggcggcttggagcacactgactccttttcttttgggggatctgccactaactccctatttcccatcccagaaacatttgtctcttggcaccaccttaaaatcccttaaacatggattcccgtgggtcatttctaaagtgcagtaagaagatagatggaagtcacgccatctccctgcactccatctgccctcttgccttctccccaccacttccccgtctgtcctgcccctgcccagaaggatctgagcaggggcctggcttgctgctgaggctgtcacagctgccagagccctgggctgatcccataggtctttccttgaggacccgactcccaaggctccttccaaagaggagcccttcgggcccgtgggctgcatggatgctggcggcagagctggtcatcccccacccgcccccttgtctgcctttttaaagctgcttttgccttctgtgcccctaggtctcccctctcctctttgggtctgggggggtggtatgtggatgccacctcttgactcctgct

SEQ ID NO: 116 - DNA, 1615 bp, Homo sapiens
  CDS (122)..(667)
acctgtcgccatccccggctccctgcccagagcaccatcgctacactcgccatcctctgcgtccacctcgccgctcggttcgctgtcccagcccctcccagggccggtgggctcctcagccatgacgcctccccagcagccgccacccctgcgttcagagccgggcacactgggctctgcagcctcatcctacagccccctaggtttgaacggtgtccccgggagcatctgggactttgtttccggcagcttctcccccagcccctcccccgtcctgagtgccggccccccatcctcttcgagtgcaagtccaaacggagctgagctggcccgggtcaggcggcagctggacgaggccaagaggaagatccggcagtgggaggagtcctggcagcaggtgaagcaggtctgcgatgcctggcagcgagaggcgcaggaggccaaggagcgtgcccgtgtggccgatagcgaccggcagctggcgctgcagaagaaggaggaggtggaggcacaggtgatcttccagctccgcgccaagcagtgtgtggcctgccgggagcgggcccacggtgctgtcctgcggccctgtcagcaccacatcctctgtgagccgtgtgcggccaccgcacctgagtgcccctactgcaagggccagcccctgcagtggtgacctcagcggggacagccacctcctgctgggcaccctggctccagcgctcctcctgaccacggacatgtcgtcactcgcttctggtgccaccgacgtgaggaccgaggctgggagcccttcctgttacacgttatcatgaggctgggagccccgcctgcgcttggcctgacagcctttcctgtcacacgttgtcacctatctagtcctaccgacggtttcaaggtattttcctcaaaaaccttaaatgcaaacccacagaacccgcctgcctgtccctgaggggcctggtgcctccgggatccacgcggcgctgtgatcacagcagtttgtggtcctgacactactgtgactaggccactgggagctggggtctttcaaagcactttgtaaaccgaggaatttagttagaggttataaattgctctaagctgctttctgtttttttttaatatgcgataatatgaagctttatatgtgtactgtgaacttaaatatttcatatcagtttattgtcaattcatagtatgctaaatatattagatttcatattctgaaactagtacttatgaaatgagtgtttatctagtagtaagacctaggatttttacattttccaattaagtgcaaatagtatttataagcagagtgattatggattgagatgtttttaacttgatggaaggagctagttttcctgagcctgtgtgtgcaccaggcactggggctgatgttccagcctcgtggcgtgggagcaggagagctccgtcctgcatttctgtggtccgtggccgctgtttctgtgcgcctgcgcctcggagagcaagtgaaggagcatcatgggttttgttttctcccttaaccctctgaaagacagtttgatactaacaaaaaacgcagcagaggggatccaacgtcagagcttttagaattacttttttaagcagc

SEQ ID NO: 117 - DNA, 1765 bp, Homo sapiens
  CDS (122)..(817)
acctgtcgccatccccggctccctgcccagagcaccatcgctacactcgccatcctctgcgtccacctcgccgctcggttcgctgtcccagcccctcccagggccggtgggctcctcagccatgacgcctccccagcagccgccacccctgcgttcagagccgggcacactgggctctgcagcctcatcctacagccccctaggtttgaacggtgtccccgggagcatctgggactttgtttccggcagcttctcccccagcccctcccccgtcctgagtgccggccccccatcctcttcgagtgcaagtccaaacggagctgagctggcccgggtcaggcggcagctggacgaggccaagaggaagatccggcagtgggaggagtcctggcagcaggtgaagcaggtctgcgatgcctggcagcgagaggcgcaggaggccaaggagcgtgcccgtgtggccgatagcgaccggcagctggcgctgcagaagaaggaggaggtggaggcacaggtgaagcagctgcaggaggagctggagggcctgggcgtagcctccacactgccggggctgcggggctgtggggacatcggcaccattcccctgccgaagctgcactcgctgcagagtcagctgcgcctggacctggaggcggtggacggcgtgatcttccagctccgcgccaagcagtgtgtggcctgccgggagcgggcccacggtgctgtcctgcggccctgtcagcaccacatcctctgtgagccgtgtgcggccaccgcacctgagtgcccctactgcaagggccagcccctgcagtggtgacctcagcggggacagccacctcctgctgggcaccctggctccagcgctcctcctgaccacggacatgtcgtcactcgcttctggtgccaccgacgtgaggaccgaggctgggagcccttcctgttacacgttatcatgaggctgggagccccgcctgcgcttggcctgacagcctttcctgtcacacgttgtcacctatctagtcctaccgacggtttcaaggtattttcctcaaaaaccttaaatgcaaacccacagaacccgcctgcctgtccctgaggggcctggtgcctccgggatccacgcggcgctgtgatcacagcagtttgtggtcctgacactactgtgactaggccactgggagctggggtctttcaaagcactttgtaaaccgaggaatttagttagaggttataaattgctctaagctgctttctgtttttttttaatatgcgataatatgaagctttatatgtgtactgtgaacttaaatatttcatatcagtttattgtcaattcatagtatgctaaatatattagatttcatattctgaaactagtacttatgaaatgagtgtttatctagtagtaagacctaggatttttacattttccaattaagtgcaaatagtatttataagcagagtgattatggattgagatgtttttaacttgatggaaggagctagttttcctgagcctgtgtgtgcaccaggcactggggctgatgttccagcctcgtggcgtgggagcaggagagctccgtcctgcatttctgtggtccgtggccgctgtttctgtgcgcctgcgcctcggagagcaagtgaaggagcatcatgggttttgttttctcccttaaccctctgaaagacagtttgatactaacaaaaaacgcagcagaggggatccaacgtcagagcttttagaattacttttttaagcagc

SEQ ID NO: 118 - DNA, 4473 bp, Homo sapiens
  CDS (67)..(1509)
gcggcgcgcacactgctcgctgggccgcggctcccgggtgtcccaggcccggccggtgcgcagagcatggcgggtgcgggcccgaagcggcgcgcgctagcggcgccggcggccgaggagaaggaagaggcgcgggagaagatgctggccgccaagagcgcggacggctcggcgccggcaggcgagggcgagggcgtgaccctgcagcggaacatcacgctgctcaacggcgtggccatcatcgtggggaccattatcggctcgggcatcttcgtgacgcccacgggcgtgctcaaggaggcaggctcgccggggctggcgctggtggtgtgggccgcgtgcggcgtcttctccatcgtgggcgcgctctgctacgcggagctcggcaccaccatctccaaatcgggcggcgactacgcctacatgctggaggtctacggctcgctgcccgccttcctcaagccgctcttccccacctgcccggtgcccgaggaggcagccaagctcgtggcctgcctctgcgtgctgctgctcacggccgtgaactgctacagcgtgaaggccgccacccgggtccaggatgcctttgccgccgccaagctcctggccctggccctgatcatcctgctgggcttcgtccagatcgggaagggtgatgtgtccaatctagatcccaacttctcatttgaaggcaccaaactggatgtggggaacattgtgctggcattatacagcggcctctttgcctatggaggatggaattacttgaatttcgtcacagaggaaatgatcaacccctacagaaacctgcccctggccatcatcatctccctgcccatcgtgacgctggtgtacgtgctgaccaacctggcctacttcaccaccctgtccaccgagcagatgctgtcgtccgaggccgtggccgtggacttcgggaactatcacctgggcgtcatgtcctggatcatccccgtcttcgtgggcctgtcctgcttcggctccgtcaatgggtccctgttcacatcctccaggctcttcttcgtggggtcccgggaaggccacctgccctccatcctctccatgatccacccacagctcctcacccccgtgccgtccctcgtgttcacgtgtgtgatgacgctgctctacgccttctccaaggacatcttctccgtcatcaacttcttcagcttcttcaactggctctgcgtggccctggccatcatcggcatgatctggctgcgccacagaaagcctgagcttgagcggcccatcaaggtgaacctggccctgcctgtgttcttcatcctggcctgcctcttcctgatcgccgtctccttctggaagacacccgtggagtgtggcatcggcttcaccatcatcctcagcgggctgcccgtctacttcttcggggtctggtggaaaaacaagcccaagtggctcctccagggcatcttctccacgaccgtcctgtgtcagaagctcatgcaggtggtcccccaggagacatagccaggaggccgagtggctgccggaggagcatgcgcagaggccagttaaagtagatcacctcctcgaacccactccggttccccgcaacccacagctcagctgcccatcccagtccctcgccgtccctcccaggtcgggcagtggaggctgctgtgaaaactctggtacgaatctcatccctcaactgagggccagggacccaggtgtgcctgtgctcctgcccaggagcagcttttggtctccttgggccctttttcccttccctcctttgtttacttatatatatattttttttaaacttaaattttgggtcaacttgacaccactaagatgattttttaaggagctgggggaaggcaggagccttcctttctcctgccccaagggcccagaccctgggcaaacagagctactgagacttggaacctcattgctacgacagacttgcactgaagccggacagctgcccagacacatgggcttgtgacattcgtgaaaaccaaccctgtgggcttatgtctctgccttagggtttgcagagtggaaactcagccgtagggtggcactgggagggggtgggggatctgggcaaggtgggtgattcctcccaggaggtgcttgaggccccgatggactcctgaccataatcctagccccgagacaccatcctgagccagggaacagccccagggttggggggtgccggcatctcccctagctcaccaggcctggcctctgggcagtgtggcctcttggctatttctgttccagttttggaggctgagttctggttcatgcagacaaagccctgtccttcagtcttctagaaacagagacaagaaaggcagacacaccgcggccaggcacccatgtgggcgcccaccctgggctccacacagcagtgtcccctgccccagaggtcgcagctaccctcagcctccaatgcattggcctctgtaccgcccggcagccccttctggccggtgctgggttcccactcccggcctaggcacctccccgctctccctgtcacgctcatgtcctgtcctggtcctgatgcccgttgtctaggagacagagccaagcactgctcacgtctctgccgcctgcgtttggaggcccctgggctctcacccagtccccacccgcctgcagagagggaactagggcaccccttgtttctgttgttcccgtgaatttttttcgctatgggaggcagccgaggcctggccaatgcggcccactttcctgagctgtcgctgcctccatggcagcagccaaggacccccagaacaagaagacccccccgcaggatccctcctgagctcggggggctctgccttctcaggccccgggcttcccttctccccagccagaggtggagccaagtggtccagcgtcactccagtgctcagctgtggctggaggagctggcctgtggcacagccctgagtgtcccaagccgggagccaacgaagccggacacggcttcactgaccagcggctgctcaagccgcaagctctcagcaagtgcccagtggagcctgccgcccccacctgggcaccgggaccccctcaccatccagtgggcccggagaaacctgatgaacagtttggggactcaggaccagatgtccgtctctcttgcttgaggaatgaagacctttattcacccctgccccgttgcttcccgctgcacatggacagacttcacagcgtctgctcataggacctgcatccttcctggggacgaattccactcgtccaagggacagcccacggtctggaggccgaggaccaccagcaggcaggtggactgactgtgttgggcaagacctcttccctctgggcctgttctcttggctgcaaataaggacagcagctggtgccccacctgcctggtgcattgctgtgtgaatccaggaggcagtggacatcgtaggcagccacggccccgggtccaggagaagtgctccctggaggcacgcaccactgcttcccactggggccggcggggcccacgcacgacgtcagcctcttaccttcccgcctcggctaggggtcctcgggatgccgttctgttccaacctcctgctctgggaggtggacatgcctcaaggatacagggagccggcggcctctcgacggcacgcacttgcctgttggctgctgcggctgtgggcgagcatgggggctgccagcgtctgttgtggaaagtagctgctagtgaaatggctggggccgctggggtccgtcttcacactgcgcaggtctcttctgggcgtctgagctggggtgggagctcctccgcagaaggttggtggggggtccagtctgtgatccttggtgctgtgtgccccactccagcctggggaccccacttcagaaggtaggggccgtgtcccgcggtgctgactgaggcctgcttccccctccccctcctgctgtgctggaattccacagggaccagggccaccgcaggggactgtctcagaagacttgatttttccgtccctttttctccacactccactgacaaacgtccccagcggtttccacttgtgggcttcaggtgttttcaagcacaacccaccacaacaagcaagtgcattttcagtcgttgtgcttttttgttttgtgctaacgtcttactaatttaaagatgctgtcggcaccatgtttatttatttccagtggtcatgctcagccttgctgctctgcgtggcgcaggtgccatgcctgctccctgtctgtgtcccagccacgcagggccatccactgtgacgtcggccgaccaggctggacaccctctgccgagtaatgacgtgtgtggctgggaccttctttattctgtgttaatggctaacctgttacactgggctgggttgggtagggtgttctggcttttttgtggggtttttatttttaaagaaacactcaatcatcctaaaaaaaaaaaaa

SEQ ID NO: 119 - DNA, 866 bp, Homo sapiens
  CDS (15)..(734)
gcgcggcggacgggatgaggcgctgcagtctctgcgctttcgacgccgcccgggggcccaggcggctgatgcgtgtgggcctcgcgctgatcttggtgggccacgtgaacctgctgctgggggccgtgctgcatggcaccgtcctgcggcacgtggccaatccccgcggcgctgtcacgccggagtacaccgtagccaatgtcatctctgtcggctcggggctgctgagcgtttccgtgggacttgtggccctcctggcgtccaggaaccttcttcgccctccactgcactgggtcctgctggcactagctctggtgaacctgctcttgtccgttgcctgctccctgggcctccttcttgctgtgtcactcactgtggccaacggtggccgccgccttattgctgactgccacccaggactgctggatcctctggtaccactggatgaggggccgggacatactgactgcccctttgaccccacaagaatctatgatacagccttggctctctggatcccttctttgctcatgtctgcaggggaggctgctctatctggttactgctgtgtggctgcactcactctacgtggagttgggccctgcaggaaggacggacttcaggggcagctagaggaaatgacagagcttgaatctcctaaatgtaaaaggcaggaaaatgagcagctactggatcaaaatcaagaaatccgggcatcacagagaagttgggtttaggacagcaggtgctgttccgagactcagtcctaaagggttttttttcccactaagcaaggggccctgacctcgggatgagataacaaattgtaataaagtaacttctcttttcttctaaaaaaaaaaaaa

SEQ ID NO: 120 - DNA, 2586 bp, Homo sapiens
  CDS (174)..(2546)
ttatccgcgggtcacattgccgttcgcctcagtctttggcccctcccgccgggtgaggttggcaccccgtttttcctgctctgagagggaccggttgccaccgccatacttctgtcgccctgtcgtctgtgttgtgactgctttggacgtgggagtcacctgaaagccaggaaatggacttggtggctttcgaggatgtggctgtgaacttcacccaggaggagtggtctttgctggatccttcccagaagaatctctacagagaagtgatgcaggaaaccttgaggaatctggcctccataggagaaaaatggaaagaccagaacattgaagatcagtacaaaaatcccaggaataatctaagaagtcttctgggagagagagttgatgaaaatacagaagaaaatcattgtggagaaacttctagccagattccagatgacacactgaacaaaaaaacttctcctggagtaaaatcatgtgaaagcagtgtgtgtggagaagtcttcgtgggtcattcttcccttaataggcacattagagctgacactgcacacaagccgtctgagtatcaggaatatggacaggagccatataagtgtcaacaacgtaagaaagccttcagatgtcacccctcctttcaaatgcaagaaaaggctcacactggagaaaaactctatgattgtaaagaatgtggaaaaaccttcatatcccattcaagcattcaaagacacatgataatgcacaatggagatggaacttataaatgtaagttttgtgggaaagcctgcccttgtctcagcatatatcttatacatgaacgagttcacactggagagaaaccatatgaatgtaaacaatgtggtaaagcctttagttattcaacttcccttcaaatacatgaaagaactcacactggagagaagccttatgaatgtaaggaatgtgggaaagcattcggtagtcccaattccctttatgaacatagaagaactcacactggagagaagccatatgaatgcaaacaatgtggaaaagccttcagatggttccattcctttcaaatacatgaaagaactcacagtgaggagaaggcttatgaatgtaccaaatgtgggaaagcattcaaacatgaaagaactcacactggagagaaaccttatgaatgcaagcactgtggtaaagccttcaatcgttccagttcctttcactatcatgaaaggactcacactggagagaaaccctatgaatgtaagcagtgtagtaaagccttcatttcttccacttcctttcgatatcatgaaaggactcacactggagagaaaccgtatgagtgtaagcaatgtgggaaagccttcagatctgcctcacaccttcaaatgcatggaaggactcacactcaagagaaaccctatgaatgtaagcagtgtggtaaagccttcattttttccacttcctttcgatatcatgaaaggactcacactggagagaaaccctatgagtgtaagcaatgtgggaaagccttcacatctgcctcacaccttcaaatgcatgaaaggactcacactggaaagcaactgtatgaatctaaacaatgtgaaaaaacctttggatctgtcagaaaccttcaaattcatgaaaagacacaccctggagagaaaccctataaggaacatggaaaagcattcaacaatttctcttcctttcaaatacatgcaacaatgcacagaggacagaatgcctatgaatgtaaagagtgtgacaaagcattcatatctgccaagatccttcgagtacatgcaagaacacaccctggagagaaaccctatgaatgtaaggaatgcggaaaagcacataaaagggctcacactggagtgaaaccgtatgaatgcaaggaatgtggcaaagccttcacttcttctggttcctttcagtgtcataaaaggattcacactggagagaaaccctatgagtgtaagcagtgtggtaaagccttcatttcttccactgccattcgtagacatgaaaggactcacactggagagaaaccctatgagtgtaagcaatgtggaaaagcctttatttctttcagttccattcagtaccatgaaaggactcacactggagagaaacagtatgagtgtaagcagtgtggtaaagccttcatgtcttctactgcatttcagtatcatgaaaagacccacaccagagagaaacactatgaatgtaagcagtgtgggaaagccttcatttcttccggtagccttcgatatcatgaaaggactcacactggagagaaaccctatgaatgtaagcagtgtggtaaagccttcagatctgccactcaacttcagatgcatagaaagattcacactggcgagaaaccctatgaatgtaagcaatgtgggaaagcctacagatctgtctcacaacttctggtgcatgaaaggactcacactgtagagcaaccctatgaatataagcaatatgggaaagccttcagatttgctaagaaccttcaaatacagacaatgaatgtaaacaattaaatgtttatagcagctgcatactaaaaaaaaaaaaaaa

SEQ ID NO: 121 - DNA, 1289 bp, Homo sapiens
  CDS (499)..(1050)
ctgtcctgatatagatggagaggggactggtttaaaatgacagtctcaagttcatttagaaagagaaggctaattcaaagaaacagcaaggcaagcttcctttctctgtaggaatcattattatccccctttgtcatggcccaccggggagcccattttgcctttagatcccgctggcagaagaccgacgatgaactctgtagacatagcatgtcttttatccttcacaaagccattcgcaatgacttctttcagagctatctctacctgctggaaaaaattcccctgggtccagattaagattttgaatctgatacatatctgtcattttgggatttcttttcattggattcctggttaattacgtcatctttcatcgtgcatcttctcttgattgtaaccctcattgggctggaatatagcttcaagaaacttctgaagaatgaatctataggagtgaaattgtacgctttaacaagccaagtcatcaatggtgagatgcagttctatgccagagctaaacttttctaccaagaagtaccagccacagaagagggtatgatgggaaatttcattgaactgtccagcccagacatccaggcctctcagaaatttcttaggaaatttgttggggggcctgggagagctggaacagactgcgccttggactgcggctccgggataggaagggtcagcaaacacgtcttattgcctgttttcaacagtgtggagctggtggatatgatggaatcctttctccttgaagcccagaactacctgcaggtcaaaggtgacaaagtagaaagctaccactgctacagcctgcaggaattcacaccccccttcaggagatatgatgtcatctggattcagtgggtcgtagggcacctgactgataaggaccttcttgcatttctttcccggtgccgagatggcctgaaagaaaatggcatcatcatattgaaggacaatgtggcccgggagggctgtatccttgatctctctgacagcagtgtgactcgggacatggacatcctccggagccagagctaaatcaaatggtaaaccattaccaaacagtctaagtgcagcaaaacaatggtacttatgttttaggcctttgtaattcttagagcaaattagcagaatcttctttttaggctcatcctgggaattttctgtttctttcaccagtatccttaattctcttaacccttgactttctgctttgccaatattcacaagctgattgacacagttgtcaatattctctgctatgggcttctgag

SEQ ID NO: 122 - DNA, 1534 bp, Homo sapiens
  CDS (71)..(1441)
ctgggtccaggaagcacgctcccagcggcaccacaatgcccacttcggctctgaccttgtccgagcgtctatgcgcaggaagaagagcaccaggggagaccaggctccaggccacgacagggaggctgaggctgctgtgaaagagaaggaagaggggccagagcccaggctcaccattgatgaggcccctcaggagaggctcagggagactgagggacctgatttcccatcgccttctgtccccctaaaggcttcagatcctgaggaggcgtcccaggcccaggaagatcctggccaaggagaccaacaggtctgtgccgaggaggctgacccggagctggagcccgcgtcggggggagagcaggagccgcggccccagcaagcccagaccaaggccgcgtcccagatcctggagaatggggaggaggccccggggcccgacccctctctcgaccgcatgctcagcagcagctcctcggtgtccagccttaactcctccacgctgagcggcagccagatgagcctgtcaggcgacgcggaggcggtgcaggtccgcggctccgtgcacttcgcgctgcactacgagccgggcgccgccgagctgcgcgtgcacgtgatccagtgccagggcctggccgccgcccggcgccgccgctcggacccctacgtcaaaagctacctcctcccggataagcagagcaagcgcaagacggcggtgaagaaacggaatctgaatccggttttcaacgagactctccggtactccgtcccgcaggccgagcttcagggccgcgtgctgagcctgtctgtgtggcaccgcgaaagcctgggtcgcaacatctttctgggcgaagttgaagtgcccctggacacgtgggactggggctctgagcccacctggctccccctgcagccccgggtcccaccctctcccgacgaccttccgagccgcgggttactcgccctgtccctcaagtacgtccccgccggctccgagggcgcaggactgcccccgagcggggagctgcacttctgggtgaaggaggctcgggacctcctgccgctgcgggcaggatccctggacacttacgtacaatgcttcgtgctgcctgatgacagccgggccagccgccagcgtacaagggttgtgcgacgcagcctcagccctgtgttcaatcacaccatggtgtacgatggctttgggcctgctgacctgcgccaggcttgtgccgagctctccctctgggaccatggggccctggccaaccgccagctggggggcacacgcctcagcctgggcaccggcagcagctatgggctgcaggtgccctggatggattccacacctgaggagaagcagctgtggcaagccctcctggagcagccgtgcgagtgggtggatggccttctacccctcagaaccaacctggcccccaggacgtagccccaccaagcctctctctctggacccccatctcagggcctgcccttggctaaagtcaataaagtctattctaagagcaaaaaaaaaaaa

SEQ ID NO: 123 - DNA, 538 bp, Homo sapiens
  CDS (72)..(422)
ccgtcgacgtgaaatagcctcagactttagtgtcagtcaatcccggagatgtcctaaccctggcctgcaatatgtctgctctgtccccagaagggcctgtcttgtggttcaagagcattgggccaggacaacaattaatctttagttgcaatggaagccacttccccagagtaactccagtggaaaacacaatggttgatcaaactgactattccattcgcatcagtgacgtgttgccagaggatgctggcacctactactgtgtgaagttaagggtaggacaccctgacatggagtttttctctggtccaggcaccaccgtgtatgtgaatggtgagcacagcctgatgcactttattccctgggtttatgaagatgaatctttaaaacccttcaccatgtaccaaatcatcactatatactgaacaccatgctcctttatccacgaactaccctgtagactaggtttcttctaatagcctttctagtaagccattctggacaacctgtgccaaatactgaatcaagctatgttgac

SEQ ID NO: 124 - DNA, 1978 bp, Homo sapiens
  CDS (95)..(1894)
tttcgtgcgtgggcctcagaaagaagttaaggcacccgcgagccgggcaactgccctccttccgcgccggcggagcgattaaagtgaagaaacaatggccagcaatcacaaatcttcagcagctcgccctgtttcaagaggtggagttgggttaacaggaaggcctccttctgggatacgacccctatcaggaaatattcgagtggcaactgcaatgccacctgggacagcaagaccaggttctcgtggttgtcccatagggactggtggagttctgtcttctcaaatcaaagttgcccatcgccctgtaacacaacaaggtttgactggaatgaaaactgggacgaaaggtccccagaggcaaattttagacaaatcttactatcttgggcttcttagaagtaaaataagtgaacttacaactgaagttaataaacttcagaagggaatagaaatgtacaatcaagagaattcagtatatttgtcatatgaaaagagggctgagactttagctgttgagataaaagagcttcaaggacaactagcagactacaacatgttggtagataaacttaataccaacactgaaatggaagaagtaatgaatgattacaatatgcttaaagctcaaaatgatcgagaaacacaaagtttggatgtcatatttactgaaagacaagcgaaagaaaaacaaatcagaagtgtcgaagaagaaattgaacaggaaaaacaagcaacagatgacattatcaaaaatatgtcttttgaaaaccaagtcaagtacctagagatgaaaaccacaaatgagaaactgttacaggaattagatacacttcaacaacaattggattcacagaacatgaaaaaagagagcctggaagcagaaatagctcactcccaggtgaaacaggaggcggtattgctgcatgaaaaactttatgagttggagtcccatcgagatcaaatgattgcagaagacaaaagcataggatctccaatggaagagagagagaaattacttaagcagattaaagatgataatcaggaaatagccagcatggaaagacagttaacagatacaaaagaaaagataaatcagtttattgaagaaattagacaacttgacatggatttagaggaacaccaaggtgaaatgaaccagaaatacaaggagctaaagaaaagggaggaacatatggacacttttattgagacttttgaggaaacaaagaatcaggaactgaaacgaaaggcacagatagaagccaacattgttgcactcttggagcactgcagtcgaaatataaatcgtatagaacagatatcctctatcaccaatcaagagctaaagatgatgcaggatgacctcaattttaaatctactgaagtgcagaaatcacaaagtacagctcagaatttgacttcagacattcaacgtctgcagttggatctgcagaaaatggagcttctagaaagtaagatgactgaagaacagcattctctaaaaagcaaaattaagcaaatgacaactgatctggagatatataatgatttgccagctttaaaatcatcaggtgaagaaaagataaagaaattacatcaggagagaatgatattatcaacccacagaaatgcctttaagaaaataatggagaagcaaaacatagagtatgaggcactaaaaacacaattgcaagaaaatgagacacattctcagcttacaaatttggagagaaagtggcaacaccttgagcaaaataattttgcgatgaaagaattcatagcaaccaagagtcaagagagtgattaccagccaattaagaaaaatgtgaccaagcagattgcagagtacaataaaaccatcgtggatgctttacatagcaccagcggaaactgagtttaagtccactgaaagtctctaaggaagtatcctcttgctgctaaacttggtacaagttgactaccaaaaaaaaaaaaa

SEQ ID NO: 125 - DNA, 3948 bp, Homo sapiens
  CDS (60)..(1844)
tgccacaactgattctaaaggatccgaagcagctcaacagtagcttcaaaagaactggaatggaatctcaacctttcctgaatatgaaatttgaaacggattatttcgtaaaggttgtcccttttccttccattaaaaacgaaagcaattaccaccctttcttctttagaacccgagcctgtgacctgttgttacagccggacaatctagcttgtaaacccttctggaagcctcggaacctgaacatcagccagcatggctcggacatgcaggtgtccttcgaccacgcaccgcacaacttcggcttccgtttcttctatcttcactacaagctcaagcacgaaggacctttcaagcgaaagacctgtaagcaggagcaaactacagagatgaccagctgcctccttcaaaatgtttctccaggggattatataattgagctggtggatgacactaacacaacaagaaaagtgatgcattatgccttaaagccagtgcactccccgtgggccgggcccatcagagccgtggccatcacagtgccactggtagtcatatcggcattcgcgacgctcttcactgtgatgtgccgcaagaagcaacaagaaaatatatattcacatttagatgaagagagctctgagtcttccacatacactgcagcactcccaagagagaggctccggccgcggccgaaggtctttctctgctattccagtaaagatggccagaatcacatgaatgtcgtccagtgtttcgcctacttcctccaggacttctgtggctgtgaggtggctctggacctgtgggaagacttcagcctctgtagagaagggcagagagaatgggtcatccagaagatccacgagtcccagttcatcattgtggtttgttccaaaggtatgaagtactttgtggacaagaagaactacaaacacaaaggaggtggccgaggctcggggaaaggagagctcttcctggtggcggtgtcagccattgccgaaaagctccgccaggccaagcagagttcgtccgcggcgctcagcaagtttatcgccgtctactttgattattcctgcgagggagacgtccccggtatcctagacctgagtaccaagtacagactcatggacaatcttcctcagctctgttcccacctgcactcccgagaccacggcctccaggagccggggcagcacacgcgacagggcagcagaaggaactacttccggagcaagtcaggccggtccctatacgtcgccatttgcaacatgcaccagtttattgacgaggagcccgactggttcgaaaagcagttcgttcccttccatcctcctccactgcgctaccgggagccagtcttggagaaatttgattcgggcttggttttaaatgatgtcatgtgcaaaccagggcctgagagtgacttctgcctaaaggtagaggcggctgttcttggggcaaccggaccagccgactcccagcacgagagtcagcatgggggcctggaccaagacggggaggcccggcctgcccttgacggtagcgccgccctgcaacccctgctgcacacggtgaaagccggcagcccctcggacatgccgcgggactcaggcatctatgactcgtctgtgccctcatccgagctgtctctgccactgatggaaggactctcgacggaccagacagaaacgtcttccctgacggagagcgtgtcctcctcttcaggcctgggtgaggaggaacctcctgcccttccttccaagctcctctcttctgggtcatgcaaagcagatcttggttgccgcagctacactgatgaactccacgcggtcgccccttggtaacaaaacgaaagagtctaagcattgccactttagctgctgcctccctctgattccccagctcatctccctggttgcatggcccacttggagctgaggtctcatacaaggatatttggagtgaaatgctggccagtacttgttctcccttgccccaaccctttaccggatatcttgacaaactctccaattttctaaaatgatatggagctctgaaaggcatgtccataaggtctgacaacagcttgccaaatttggttagtccttggatcagagcctgttgtgggaggtagggaggaaatatgtaaagaaaaacaggaagatacctgcactaatcattcagacttcattgagctctgcaaactttgcctgtttgctattggctaccttgatttgaaatgctttgtgaaaaaaggcacttttaacatcatagccacagaaatcaagtgccagtctatctggaatccatgttgtattgcagataatgttctcatttatttttgatgtagaatttacattgccatgggtgttaaataagctttgagtcaaaagtcaagaaagtgactgaatatacagccaccttttatgaaatgaggctctgtgttactgggtggcatgactgattgaggtgaagctcacggggccaggctgaccgtcttgaccgttccacttgagataggttggtcatcgtgcagaaggccccaggacctcagcacacacagcctcctcttggtctgagtaggcatcatgtgggggccagatctgcctgctgtttccatgggttacatttactgtgctgtatctcagatgttggtgtctggaagtttattcttaagagactgctacccagctggtctgtattattggaagttgcagttcgtgctttggttggccttctggtctaaagctgtgtcctgaatattagggatcacaattcactgaaatacagcagtgtgtggaggtgatggccagttaatctgctgaactggttttgactaatgacaaacctctttttaagatggtagaatggaggtgatagtcacaaaagtaaatgttccatttttatgaatgactttctacagagtttctatttctaaagaaaaaacaattgttcacatcccatctgatgattagcatgtgtgtaatgaatgctgtcttggtctcccctgtggaaacccttctccctgtgccttagagcaggtgtgtacatctctcactacctttctcatgggtgctgttagattttggcacccgttttctcagcattcagcccagggaatgtggttttcacttcttcgtcaagaccaacatgaaggggtatgttgagaaacatcctgaggcaaggtgggaggtgggatggggcaggactttcccttccaagcacatgcatggcaggtggggaaaggggggcttgcacccctgctggaaagaaaaggtttgtgtatatttctgatgcaaatgtcatactcactgctctgtaaaggcagctggcagctttttgggaaaagaacgtgctcgtctgttctctggcatcaagtttcttgcagctgctctgagggagagacagtgagctgcaagactgcctccccataacaacaggcaactcagagaagagtcattttatgttgttcctatggaatctggaatgagtgcagagctcctacccacacatgactgccccgccatttcatcctaggcattctgtgaaggagattggttagtccaaacttgctaacatacgaaaattcacttggaacatgatgagagatttcttattgaggccaagagatgtttcctgtcccagaggaaccattaggagtcgcttttagggtattcagctttgttcatgaaataaggcatctctgagaaagtggccccagggagagaatggaggactgggaggagaagcattaactgagctccaagggtgtgtgggcagagagcttgctatgtgaactcactccttaagaaaatggaagagaaaaagagagtgctagttaaaaaatcgggatgttttagtttggatttagggttttgatacttatgttgaaatactaatgtttctgatcaataaaatcaaactcttaatataaaaaaaaaaaaa

SEQ ID NO: 126 - DNA, 2680 bp, Homo sapiens
  CDS (2041)..(2499)
actttgaaagcctgacacagtacaatctaacagtggctgcagctgaccgtgggcagccaccccaaagctcagtcgtgccagtcactgtcactgtactagatgtcaatgacaacccacctgtctttacccgagcatcctaccgtgtgacagtacctgaagacacacctgttggagctgagctgctgcatgtagaggcctctgacgctgaccctggccctcatggcctcgtgcgtttcactgtcagctcaggcgacccatcagggctctttgagctggatgagagctcaggcaccttgcgactggcccatgccctggactgtgagacccaggctcgacatcagcttgtagtacaggctgctgaccctgctggtgcacactttgctttggcaccagtgacaattgaggtccaggatgtgaatgatcatggcccagccttcccactgaacttactcagcaccagcgtggccgagaatcagcctccaggcactctcgtgaccactctgcatgcaatcgacggggatgctggggcttttgggaggctccgttacagcctgttggaggctgggccaggacctgagggccgtgaggcatttgcactgaacagctcaacaggggagttgcgtgcgcgagtgccctttgactatgagcacacagaaagcttccggctgctggtgggtgctgctgatgctgggaatctctcagcctctgtcactgtgtcggtgctagtgactggagaggatgagtatgaccctgtatttctggcaccagctttccacttccaagtgcccgaaggtgcccggcgtggccacagcttgggtcacgtgcaggccacagatgaggatgggggtgccgatggcctggttctgtattcccttgccacctcttccccctattttggtattaaccagactacaggagccctgtacctgcgggtggacagtcgggcaccaggcagcggaacagccacctctgggggtgggggccggacccggcgggaagcaccacgggagctgaggctggaggtgatagcacgggggcctctgcctggttcccggagtgccacagtgcctgtgaccgtggatatcacccacaccgcactgggcctggcacctgacctcaacctgctattagtaggggccgtggcagcctccttgggagttgtggtggtgcttgcactggcagccctggtcctaggacttgttcgggcccgtagccgcaaggctgaggcagcccctggcccaatgtcacaggcagcacccctagccagtgactcactgcagaaactgggccgggagccacctagtccaccaccctctgagcacctctatcaccagactcttcccagctatggtgggccaggagctggaggaccctacccccgtggtggctccttggacccttcacattcaagtggccgaggatcagcagaggctgcagaggatgatgagatccgcatgatcaatgagttcccccgtgtggccagtgtggcctcctctctggctgcccgtggccctgactcaggcatccagcaggatgcagatggtctgagtgacacatcctgcgaaccacctgcccctgacacctggtataagggccgaaaggcagggctgctgctgccaggtgcaggagccactctctacagagaggaggggcccccagccactgccacagccttcctggggggctgtggcctgagccctgcacccactggggactatggcttcccagcagatggcaagccatgtgtggcaggtgcgctgacagccattgtggccggcgaggaggagctccgtggcagctataactgggactacctgctgagctggtgccctcagttccaaccactggccagtgtcttcacagagatcgctcggctcaaggatgaagctcggccatgtcccccagctccccgtatcgacccaccacccctcatcactgccgtggcccacccaggagccaagtctgtgccccccaagccagcaaacacagctgcagcccgggccatcttcccaccagcttttcaccgctcccccatcagccatgaaggctccctgtcctcagctgccatgtcccccagcttctcaccctctctgtctcctctggctgctcgctcacccgttgtctcaccatttgggggggcccagggtccctcagcctcagcactcagcgcaaagtctggcctggagccacctgatgacacggagctgcacatctagctgtggcccaggctgggccccgacctgggatgcgcacagtgtccccaacgcaggccccactctgagcctgccctgggcagcctcggactatgactggctacggggaggccaccaccaggccccagctctccaccctgaactccccagccccctcagagtactaggaccacagaagccctgttgctcactgacctgtgaccaggtccaatgtggggagaaatatgaaggaggtagcagccctgggttctcctcagtgagggatccctgccctgcaccagcaccctgagatggagctgagactttatttattgggggtagggggatggaggaggtccctccaacatgtttggacccagctcctttgggttccactgacacccctgcccctgcccctgcccagaaccaagtgccatttctcactctggagccttaataaactgcaatttgtatccaaaaaaaaaaaa

SEQ ID NO: 127 - DNA, 1497 bp, Homo sapiens
  CDS (210)..(1190)
gcgcacgctgggggcgtggctgcgcgatgtaatcggtctctggacgctgcgcggcgctcctaggagcaggcgttcccgactccggcaagagggtggcgcctggactctcgccctcagagggaggcccgtcccacggtctgtggctacggatcccaggaccctcttcgcgggcgattcgcgtagcctcaggtaactgcatcctgcccagcatgacggccccctgcccgccgccacctccagacccccagtttgtcctccgaggcacccagtcaccggtgcatgcgctgcacttctgcgaaggagcccaggctcaggggcgcccgctcctcttctcagggtctcagagtggcctggtacacatctggagcctgcagacgcggagagcggttaccaccctggatggccacggcggccagtgtgtgacctggctgcagacgctgccccaggggcgccagctcctcagtcagggccgggacctgaagctgtgcctgtgggacctcgcggagggcaggagcgctgtcgtggactccgtgtgcttggagagtgtgggcttctgccggagcagcatcctggccgggggccagccacgctggacgcttgccgtgccagggaggggcagcgacgaggttcagattctggagatgccctccaagacgtcagtgtgcgccctgaagccgaaggcagatgccaagctgggcatgcccatgtgcctgcggctgtggcaggccgactgcagctcccgcccactccttctggccggctatgaggatggatcggtggtcctgtgggacgtctctgagcagaaggtgtgcagccgcatcgcctgccatgaggagcccgtcatggaccttgactttgactcccagaaggccaggggcatctcaggctccgcggggaaggcgctggctgtctggagcctggacgggcagcaggccctgcaggtgcgtgggactcatgaactcaccaatcccgggatcgccgaggtcacgatccggccagatcgcaagatcctggccaccgcaggctgggaccaccgcatccgcgtgttccactggcggacgatgcagccactggccgtgctggccttccacagcgccgctgtccagtgcgtggccttcaccgccgatggcttgctggccgcgggctccaaggatcagcggatcagcctctggtcactctacccacgcgcatgactcacccactcccttcccgggagacgaggagggcgggcagggaggtgggcatcaggccccagccttggcctgaaacctcaagggcctctgaggaccagcaagtcatggcccaaggaccatggagtccccgctgtcttcatgaggttggtatttccttttgtggagtgcctcatcacaggacggtgactctgggggccagccagagccctggccgtccgaggcctgcaggagacgttggcttgggcctgctgtgttgccagctgagggtattttataataaatttccattgccaaaaaaaaaaaa

SEQ ID NO: 128 - DNA, 673 bp, Homo sapiens
  CDS (219)..(485)
acaagtggggcatctgtaggggccacagtgagctctcaatgatcatctgtagtggcagcaaaagagttcgagccccacttcaaacaacttcataataaaaggccagacaaaagagctgtcagccagttactacagacactcaatgcagacaccttcagagtattgggaaaagacttgccttctgccagaacttaacccaaatacacacagagagcaccatgaagccctggattcttctactcgtcatgttcatctctggagttgtgatgcttctgcctgtgctgggaagcttctggaacaaagatccctttctagatatgataagagaaactgagcagtgctgggtacagcctccatataagtactgtgagaaaaggtgtactaaaataatgacttgtgtacgtccaaatcatacatgctgctggacctactgtggaaacatctgcttagacaacgaagagccccttaaatcaatgctaaacccctagattctattggccgatcactactgtgggctgaaggatgaccatctggtctaagaagagtgctgcctacttccttcttgggacacccactggctctagctggtaacctttctgctatttccttgacctctttaccctgaagcttttgtcaaataaactgctacatcaacctgaaaaaaaaaaaaaaa

SEQ ID NO: 129 - DNA, 1470 bp, Homo sapiens
  CDS (55)..(714)
gtcgggcttgaagccatagctgcgggaccgtactcgtctcccccgacgcagaccatggagagcgcgctggcggtgccccggctgcccccgcatgatccagggacgccggtgctgtcggtggtggacatgcacacgggcggcgagcccttgcgtatcgtgctggcggggtgtccggaggtgtctgggcccaccctgctggccaagcggcgctacatgcgccagcaccttgaccacgtgcggcgacggctcatgttcgagccccgagggcaccgggacatgtacggggcggtcctagtcccgagcgagctgccggacgcgcatctgggcgtcctgttcctgcacaacgagggctacagctccatgtgcggccacgcagtgctggcgctgggccgcttcgctttggacttcgggcttgtgccggcgccccctgcgggcacccgcgaggcccgcgtcaatatccactgcccctgcgggctggtgaccgccttcgtggcatgcgaggacggccgcagccacggaccggtgcgcttccacagcgtcccggccttcgtgctggccacagatctcatggtggatgttcctggacatggaaaggtgatggtggacattgcatatggcggtgcattttatgcatttgttactgctgaaaagttaggactagacatttgttctgcaaagaccagggaccttgtggatgcagcgagtgcagtgacataggcagtgaaagctcagtttaaaattaatcatcctgatagtgaataccttgcctttttatatggaactatattaacagatggaaaagatgcttataccaaggaaccaaccaccaacatttgtgtttttgcagatgaacaggttgacagaagtcccactggctcaggagtgacagcccgaattgccttacagtatcacaaagggcttctggaactgaaccagatgagagccttcaaaagcagtgcaactggctcagtattcacagggaaagctgtgagggaagcgaaatgtggtgattttaaagctgttatagtggaagtatcaggacaagcccattacacgggtacagcaagctttataatagaagatgacgacccattgagggatggatttcttctcaagtgacttcttccatgattttaagggctttctttttaaagtaatcattatccttaaggactgttttctctaaattatatgaaaacaaataaattatacatataaactaactctcattctttgtaaaatactaccctgtggctaaatataaagtcattatacctcgtatttgcaactgtatttgtataaatatcacttatgtctagcatacaaaatgccagaaattcagagtctttttctagtgattaacgtatcaggtaaaattaaaacagtagttacttttaaaatattgctctatagtaattactattaatatcatattttgtattaaaggctcttcgaataataaaaaaaaaa

SEQ ID NO: 130 - DNA, 1583 bp, Homo sapiens
  CDS (375)..(1580)
tttccggtcttgctgaggcgctcctttccccgccccacctccgccctcttttcagggaatttcgaaggggcgtggcgtctggcaagcgcgtccccaggggtgtgtatacgcgcgttcacgggaggttaaagagggaggagcctaacccttggtggcgccggcttgcatcccaggtcgtggcggttttggtgcctgaagcagggagcgcggagtcgttcccgagagaggcggccaggctatgctcgccggtttccggcgttccgctccggccagccagagtctctgtctcaacctgtgtccgtgctccagcagtctcctcagcccggccccgcggcgcggttggcggcggcgccccaggcgcgccccctcctccgatggcggcggagatccagcccaagcctctgacccgcaagccgatcctgctgcagcggatggaggggtcccaggaggtggtgaatatggccgtgatcgtgcccaaagaggagggcgtcatcagcgtctccgaggacaggacagttcgtgtttggttaaagagagacagtggacagtattggccaagcgtataccatgcaatgccttctccatgttcatgcatgtcttttaacccggaaacaagaagactgtccataggtctagacaatggtacaatctcagagtttatattgtcagaagattataacaagatgactcctgtgaaaaactatcaagcgcatcagagcagagtgacgatgatcctgtttgtcctggagctggagtgggtgctgagcacaggacaggacaagcaatttgcctggcactgctctgagagtgggcagcgcctgggaggttatcggaccagtgctgtggcctcaggcctgcaatttgatgttgaaacccggcatgtgtttatcggtgaccactcaggccaagtaacaatcctcaaactggagcaagaaaactgcaccctggtcacaacattcagaggacacacaggtggggtgaccgctctctgttgggacccagtccagcgggtgttgttctcaggcagttcagatcactctgtcatcatgtgggacatcggtgggagaaaaggaacagccatcgagctccaaggacacaacgacagagtccaggccctctcctatgcacagcacacgcgacaattgatctcctgtggcggtgatggtgggattgtcgtctggaacatggacgtggagaggcaggagacccctgaatggttggacagtgattcctgccaaaagtgtgatcagcctttcttctggaacttcaagcaaatgtgggacagtaagaaaattggtctaagacagcaccactgccgcaagtgtgggaaggccgtctgtggcaagtgcagctccaagcgctcctccatccccctgatgggcttcgagtttgaagtgagggtctgtgacagctgccacgaggccatcacagatgaagagttaaggcgagaatttaatctgagccttgcactcagcgccgcaaccatcactcaggttgctctagtttctgctggtttagaatatagtccacggcaagcagtaaaagctctcctttgccaccaagagatttgtggtatcctgtga

SEQ ID NO: 131 - DNA, 3976 bp, Homo sapiens
  CDS (456)..(2741)
cgtgcgagcggggccgcgggcgcgcaccgactcaagagccgactgtcagcctcgtgcgggccgtgagttctcctggcgctggtgacaggggcgctgggacaggggcgctgggggcgagccctggcgggggccaggtccgaggaccctgggcgcggcggccccgccaggaggtccggccgcgagcgtgacctcacggggaggggccagcgcggctggactgggcgctgagccgagcgccgggagagcagcgcaaagccgagccgcgaggagacgcactccgtggccccgatggagcggacaaagccctggaacagctgctgacagagttggatgacttcctcaagattcttgaccaggagaacctgagcagcacagcactggtgaagaagagctgcctggcggagctcctccggctttacaccaaaagcagcagctctgatgaggagtacatttatatgaacaaagtgaccatcaacaagcaacagaatgcagagtctcaaggcaaagcgcctgaggagcagggcctgctacccaatggggagcccagccagcactcctcggcccctcagaagagccttccagacctcccgccacccaagatgattccagaacggaaacagcttgccatcccaaagacggagtctccagagggctactatgaagaggctgagccatatgacacatccctcaatgaggacggagaggctgtgagcagctcctacgagtcctacgatgaagaggacggcagcaagggcaagtcggccccttaccagtggccctcgccggaggccggcatcgagctgatgcgtgacgcccgcatctgcgccttcctgtggcgcaagaagtggctgggacagtgggccaagcagctctgtgtcatcaaggacaacaggcttctgtgctacaaatcctccaaggaccacagccctcagctggacgtgaacctactgggcagcagcgtcattcacaaggagaagcaagtgcggaagaaggagcacaagctgaagatcacaccgatgaatgccgatgtgattgtgctgggcctgcagagcaaggaccaggctgagcagtggctcagggtcatccaggaagtgagcggcctgccttccgaaggagcatctgaaggaaaccagtacaccccggatgcccagcgctttaactgccagaaaccagatatagctgagaagtacctgtcggcttcagagtatgggagctccgtggatggccaccctgaggtcccagaaaccaaagacgtcaagaagaaatgttctgctggcctcaaactgagcaacctaatgaatctgggcaggaagaaatccacctcactggagcctgtggagaggtccctcgagacatccagttacctgaacgtgctggtgaacagccagtggaagtctcgctggtgctctgtcagggacaatcacctgcacttctaccaggaccggaaccggagcaaggtggcccagcaacccctcagcctggtgggctgcgaggtggtcccagaccccagccccgaccacctctactccttccgcatcctccacaagggcgaggagctggccaagcttgaggccaagtcttccgaggaaatgggccactggctgggtctcctgctctctgagtcaggctccaagacagacccagaagagttcacctacgactatgtggatgccgatagggtctcctgtattgtgagtgcggccaaaaactctctcttactgatgcagagaaagttctcagagcccaacacttacatcgatggcctgcctagccaggaccgccaggaggagctgtatgacgacgtggacctgtcagagctcacagctgcggtggagcctaccgaggaagccacccctgttgcagatgacccaaatgagagagaatctgaccgagtgtacctggacctcacacctgtcaagtcctttctgcatggccccagcagtgcacaggcccaggcctcctccccgacgttgtcctgcctggacaatgcaactgaggccctcccggcagactcaggcccaggtcccaccccagatgagccctgcataaagtgtccagagaacctgggagaacagcagctggagagtttggagccagaggatccttccctgagaatcaccaccgtcaaaatccagacggaacagcagagaatctccttcccaccgagctgcccggatgccgtggtggccaccccacctggtgccagcccacctgtgaaggacaggttgcgcgtgaccagtgcagagatcaagcttggcaagaatcggacagaagctgaggtgaagcggtacacagaggagaaggagaggcttgaaaagaagaaggaagaaatccgggggcacctggctcagctccggaaagagaaacgggagctaaaggaaaccctactgaaatgcacagacaaggaagtcctggcgagcctggagcagaagctgaaggaaattgacgaggagtgccggggcgaggagagcaggcgcgtggacctggagctcagcatcatggaggtgaaggacaacctgaagaaggctgaggcagggcctgtgacgttaggcaccaccgtggacaccacccacctggagaatgtgagcccccgccccaaagctgtcacacctgcctctgccccagactgtaccccagtcaactctgcaaccacactcaagaacaggcctctctcggtcgtggtcacaggcaaaggcactgtactccagaaagccaaggaatgggagaagaaaggagcaagttagaaaacaagcttcatctaaagactctcatgtcaatgtggaccttggtgacaatcctgctttgttaaagcaaaaactatgcgaaagggtgagtctgtttagaagaaaaagcaaagactgaggtactgtgaatggagagcttcagctaagaggaggctctgtcccttttcagagccaaaggaaataatacaacaaaaaggaggcttctttggagacctaagtctattggatgtaaacaagacgttgtatttagggatgttctgtgtttctttcttttttgaagttgtcatcaattgctttactaagatttttaaatagtgaaaacctcctgtttagactttggtggaagatgaatcaaggaagcagggccctgtcttatgggtcacatgtctttggtgagtgagaagacctaaactcctggccatcatctcttatccaatacttagcagttggggattaaaccatccttgccttcagttctctccaatattaccaggcccaactcagtcttcagtgattttaaacagcattgacatcatctgtaaaaccatcatctgtaaaaccatctatgacatgagttttgagaaacaataatggggaaaatatttgggaccaagctgaagcactaatcccactaagttaaagacttctttccagtccaaggcaggcctgaatcaactgtctttaaataaaattttaagtgatgctgtattatatataggaaaaaatgcttaaaatcctgtcatttagaacagtgaaaagtatcttttgagattaaagtgactctttactgtaggaaaaatattaccccgggtttacagattcattgccgtggtcaggccatttttaagggaagagttatttaatataaataggccccgattttaagttccggttaaagttcattctccttccaagaacaaagtggtgatttttggttagggtgatcgccctcttaaaattggcagtgctgttccttgtgctgcccctgtcttttcccccgatggcattttttttttttttttttttttaacacaggttgaaacatttcatctattatctctgcctcatttctggagggttgtgtatcagttctctaacacttgttcctgagaactaaatgtcttttttattcttatttcctctctcataaacatttggtgaccttttaccaagtggtgagttaggttttttaaaataaaatgttcattgtatttgaaaaaaaaaaaaaaaaa

SEQ ID NO: 132 - DNA, 767 bp, Homo sapiens
  CDS (103)..(603)
gtctataggagaaaatggtgagatatcttctgtggtattaataaaagttaaaagcatttcaagtttaggcagaaaactaactgaaaaacgagaacctactgtatggctagtaatttcttccaagtcatacaagtattcgagaaatctgcaaccttgattagtaagactgaacacattggttttgtcatttattcatggaggaagcccaccacccacttggggagcaaaaggaaatttgccatctcaatttacttatcagaagtttctttgcaaaaatatgattgtcccttcagtgggacatcatttgtggtcttctctctctttttgatctgtgcaatggctggagatgtagtctacgctgacatcaaaactgttcggacttccccgttagaactcgcgtttccacttcagagatctgtttctttcaacttttctactgtccataaatcatgtcctgccaaagactggaaggtgcataagggaaaatgttactggattgctgaaactaagaaatcttggaacaaaagtcaaaatgactgtgccataaacaattcatatctcatggtgattcaagacattactgctatggtgagatttaacatttagaggtgacagcatcccccacactggcagtgaattttttgtgctacaaacttggcaaaagtctgtgaaaagaagtttcaacttcatgtgttattaactatacaaatattagttgaatgaattgttgaattacatgaaaaaaaaaaaaaaaaaaaaaaaaaagg

SEQ ID NO: 133 - DNA, 868 bp, Homo sapiens
  CDS (349)..(708)
aaggatccttaattaaattaagcccttccccccggttcgtcccctttgtgaggcccgggatgggaggtgcccggttcccccagggacagcttcaagcggtagggacagacatctgaggacccagcctcagggatgctgtccccgggcttccaggctccagcgccgtaggactgaggcagactccacggtgagaaagagacccgatctaacccaggcctttcatcagagcccaggagggaaggcaggaagtgggaccacgaggcccggggggcttctaactcgtctgtccagggagatctgaattggggtgaagagcagaatctccagaacaaggaggaggtggtgatcatggagacagatttggctgaaatgcctgagaaaggagctctgtcttcccaggattctccccatttccaagagaagagcacagaagagggagaagtggctgctctgcgcctcacggccagatcccaggaaacagtgacattcaaggatgtggccatggactttacaccagaggagtgggggaagctggatcctgcacaaagggatgtgatgctggagaactataggaacctagtctcactttggcttccagtttccaaacctgagagctacaacttggagaatggaaaagaaccattgaagcttgagagaaaagcccccaaaagcagctattcaggtgagccagatagatgggagtcttcataaatgatagcccagcaggacaatgaagaaatacttttcagtgcttaagaaagtgcctgtgtgcccttatttttaaatttttttaaaattctaaagcatttaaaatatatacagaagtccagaaaataaaataacattcatgtatccatcaaaaaaaaaa

SEQ ID NO: 134 - DNA, 967 bp, Homo sapiens
  CDS (103)..(909)
ggcctgcacagtgtctgtaaataccagagctggataagggatggcaatgagccaggaggcaatcacccagggaagtgcatggtgagcagcacaggctttgggatgaaaagagaactggacttctccggagcgaactacccgaaccccctttcggaatctctagcttcagcgcaccgcggtgccctgcttgccagccgtcagcctcaggcgcctgcccacaacaaacatggcgacaagggcgtctctggaaggccgggcagtgacgacagttctcgcgatagccgcgttttcctgcctatatctggcttgtccgcgcgatttccggcctctcggctttcggctcggaggaggccaaggtgcaacttccttcggtcgtcccgaatccgggttcatccgacaccagccgcctccaccatgccgccgaagttcgaccccaacgagatcaaagtcgtatacctgaggtgcaccggaggtgaagtcggtgccacttctgccctggcccccaagatcggccccctgggtctgtctccaaaaaaagttggtgatgacattgccaaggcaacgggtgactggaagggcctgaggattacagtgaaactgaccattcagaacagacaggcccagattgaggtggtgccttctgcctctgccctgatcatcaaagccctcaaggaaccatcaagagacagaaagaaacagaaaaacattaaacacagtgggaatatcacttttgatgagattgtcaacattgctcgacagatgcggcaccgatccttagccagagaactctctggaaccattaaagagatcctggggactgcccagtcagtgggctgtaatgttgatggccgccatcctcatgacatcatcgatgacatcaacagtggtgctgtggaatgcccagccagttaagcacaaaggaaaacatttcaataaaggatcatttgacaactggaaaaaaaaaaaa

SEQ ID NO: 135 - DNA, 445 bp, Homo sapiens
  CDS (217)..(312)
tcagagtgagacatttgtactgtggctatgtaggagaacattcttgttcttagcaaacatactgaagtttttagatattaattaccacagtgtctgccactgaatttccagtgactaagtggaaaaatataaaacatatgaatataaagaaagaaagagacaagtcaaatgtagtaaaatgacaacacttggtgactctaggtgactggtcgacagatgttcattgtactatcaatgtggctttgctgtgggtttgaaattttgcaaactaagagttgggtggcggggagaaggatacaccaaaaaactaagtgattatctttggatgggaaaatgtttggtaattgcattcttaaaatgtcttctttgtattttttaatgttcaataatgtatatgtatcagttctgtaataaaggggaaaacactttttttaaaaaaaaaaaa

SEQ ID NO: 136 - DNA, 3400 bp, Homo sapiens
  CDS (408)..(3176)
atttttctcgattgacattgataagcactgagagatcctcagtgaaggtaacccggcctgcagcagttcgcctattgatcctcggtattggcttggcaccttattgcccaaactggtaggatgattgctgaaatctgggaccttgttcctccagggatccctgatcttccaacgtttttcggtggggggtctgaggtttatttgctgttaaaaaactccttttttgggagttcccactcgcttcatcaaggaaggcaagcctgcctgcttctgcatcgacagatagccgtcttcagcttgagccccatcactaggaacccttaacattcagggatgtggccatagaattctctccagaagagtggaaatgcctggaccctgcccagcagaatttgtatagagatgtgatgttggagaactacagaaacctggtctccctagctatgtgttctcatttcacccaagactttttgccagtgcaggggatagaagattcattccacaaacttatactgagaagatatgagaaatgtgggcatgataatttacaattaaggaaaggctgtaaaagtatgaacgtgtgtaaagtgcagaagggagtttataatggaattagtaaatgcttgtcaaatactcagagcaaaatatttcaatgtaatgcacgtgtcaaagtttttagtaaatttgcaaattcaaacaaagataagacaagacatactggagagaaacactttaaatgtaacgaatgtggcaagtcatttcagaagttctcagacctaactcaacataaaggaattcatgctggagagaaaccctacacttgtgaagaacgtggcaaagactttggatggtacacagacctgaatcaacacaagaaaattcatactggagagaaaccttacaaatgtgaagaatgtggcaaagcctttaataggtcaacaaaccttactgcacataagagaattcacaacagagagaaagcttacacaggtgaagatcgtgacagagcctttggatggtccacaaacctgaatgaatataagaaaattcatactggagataaaccctacaaatgtaaagaatgtgggaaagcctttatgcattcctcacacctgaataaacatgagaaaattcatactggagagaaaccctacaaatgtaaggaatgtggcaaagtcatttcctcatcctcaagctttgctaaacataagaggattcatactggcgagaaaccctttaaatgtttagaatgtggtaaagcctttaatatttccacaacccttactaaacataggagaattcatactggagagaaaccctacacatgtgaagtatgtggcaaagcctttagacagtccgcaaacctttatgtacataggagaattcatactggagagaaaccctacacatgtggagaatgtggcaaaacctttagacagtccgcaaacctttacgtacataggagaattcatactggagagaaaccttacaaatgcgaagactgtggcaaagcctttggacggtacacagccctgaatcaacacaagaaaattcatactggagagaaaccttacaaatgtgaagagtgtggcaaagcctttaatagttcaacaaaccttactgcacataagagaattcacaccagagagaaaccctacacatgtgaagatcgtggcagagcctttggattgtccacaaacctgaatgaatataagaaaattcatactggagataaaccctacaaatgtaaagaatgtgggaaagcctttatacattccttgcacctgaataaacatgagaaaattcatactggaaagaaaccctacaaatgtaagcaatgtggcaaagtcattacctcatcctcaagctttgctaaacataagaggattcatactggcgagaaaccctttgaatgtttagaatgtggtaaagcgtttactagttccacaacccttactaaacataggagaattcatactggagagaaaccctacacatgtgaagtatgtggcaaagcctttagacagtccgcaatcctttatgtacataggagaattcatactggagagaaaccctacacatgtgaagaatgtggcaaaacctttagacagtccgcaaacctttatgtacataggagaattcatactggagagaaaccttacaaatgtgaagagtgtggcaaagcctttggacggtacacagacctgaatcaacacaagaaaattcatactggagagaaactttacaaatgtgaagagtgtggcaaagactttgtatggtacacggacctgaatcaacagaagaaaatttacactggggagaaaccttacaaatgtgaagagtgtggcaaagcctttgccccatcaacagacctgaatcaacacacgaaaattcttactggagagcaaagttacaaatgtgaagagtgtggcaaagcctttggatggtccatagacctgagtcaacacacgaaaattcatactggagaaaaaccttacaaatgtgaagagtgtggcaaagcctttagtaggtcaagaaaccttactacacataggagagttcacactagggagaaaccctacaaatgtgaagatcgtggcagatcctttggatggtccacaaacctgaacgaatataagaaaattcatactggagataaactctacaaatgtaaagaatgtgggaaagtgtttaaacagtcctcacacctgaatagacatgagaaaattcatactggaaagaaaccctacaaatgtaaggaatgtggcaaagtcattacgtcatcctcaagctttgctaaacataagaggattcatacaggtgagaaaccctttaaatgtttagaatgtggtaaagcgtttactagttccacaacccttactaaacataggagaattcatactggagagaaaccctacacatgtgaagaatgtggcaaagcctttagacagtcagcaatcctttatgtacataggagaattcatactggagagaaaccctacacatgtggagaatgtggcaaaacctttagacagtctgcaaatctttatgcgcataagaaaattcatactggagagaaaccctacacgtgtggagactgtggcaaaacctttagacagtctgcaaatctttatgcacataagaaaattcatactggagataaaaccatacaagtgtaaagaatgtggcaaagcctttaagtcatactacagcattcttaaacataagagaactcataccaggggaatgtcttacgaaggtgacgaatgtcgcggtctttaaatgctcctcaatcctttctaatcataagataattcataatgaagagaaactctaaaatgtgaaaaatgtgagaaggcttttaatcacacctcaatctgttgtagacataaaaagaatt

SEQ ID NO: 137 - DNA, 1349 bp, Homo sapiens
  CDS (161)..(1003)
aaggatccttaattaaattaatccccccccccccgctttttttcgccagccttacgggcccgaaccctcgtgtgaagggtgcagtacctaagccggagcggggtagaggcgggccgccacccccttctgacctccagtgccgccggcctcaagatcagacatggcccagaacttgaaggacttggcgggacggctgcccgccgggccccggggcatgggcacggccctgaagctgttgctgggggccggcgccgtggcctacggtgtgcgcgaatctgtgttcaccgtggaaggcgggcacagagccatcttcttcaatcggatcggtggagtgcagcaggacactatcctggccgagggccttcacttcaggatcccttggttccagtaccccattatctatgacattcgggccagacctcgacgagtgttgtctcgacccaatgctcaggagcttcctagcatgtaccagcgcctagggctggactacgaggaacgagtgttgccgtccattgtcaacgaggtgctcaagagtgtggtggccaagttcaatgcctcacagctgatcacccagcgggcccaggtatccctgttgatccgccgggagctgacagagagggccaaggacttcagcctcatcctggatgatgtggccatcacagagctgagctttagccgagagtacacagctgctgtagaagccaaacaagtggcccagcaggaggcccagcgggcccaattcttggtagaaaaagcaaagcaggaacagcggcagaaaattgtgcaggccgagggtgaggccgaggctgccaagatgcttggagaagcactgagcaagaaccctggctacatcaaacttcgcaagattcgagcagcccagaatatctccaagacgatcgccacatcacagaatcgtatctatctcacagctgacaaccttgtgctgaacctacaggatgaaagtttcaccaggggaagtgacagcctcatcaagggtaagaaatgagcctagtcaccaagaactccacccccagaggaagtggatctgcttctccagtttttgaggagccagccaggggtccagcacagccctaccccgccccagtatcatgcgatggtcccccacaccggttccctgaacccctcttggattaaggaagactgaagactagccccttttctggggaattactttcctcctccctgtgttaactggggctgttggggacagtgcgtgatttctcagtgatttcctacagtgttgttccctccctcaaggctgggaggagataaacaccaacccaggaattctcaataaatttttattacttaacctgaaaaaaaaaaaa

SEQ ID NO: 138 - DNA, 694 bp, Homo sapiens
  CDS (234)..(425)
cctcctgttgtgaatgtatctcctgatctgtttaactcctgtgtgtgaaactttgtgattcatgcaatgagaacaaggctttacgtgaacagaccagagcccaggtgcagggcggtcattccagagcccaggtgcagcaggtgcagggcggtcattctgcccacacagtggttcagatccgttcagcagccagccgccggaaggccttctccacctgttcttcccacctgggcatggtgctcctgttctatggcaccggcagctccacctacatgcgacccaccacccgctactccccgctggaagggcgcttggctgctgtcttctactccatcctcatacccaccctgaatccgctcatctacagcctgaggaaccaggacatgaagagagccctgtggaagctctatctccaggtgccatactagggtctgccatctggatgcgggagggacccaaaaatccaccttcccaagattttccttgtggtcgtggtggaagtgttagtgcctccagagacccccaggaacacacctattcgccaaagttgtcaacaaagttgaattgcaatgaatcatgcaggagaaccctgatggatgtctggataaaatggagacaaatccaatgtgcatttaatttaagcaaatagtattaaatgtacacaggggaggagagaaagctcagaacaacgaca

SEQ ID NO: 139 - DNA, 836 bp, Homo sapiens
  CDS (135)..(587)
  misc_feature (1)...(836): n = a,t,c or g
gagtcncnaatcgagatccttagtccagtgcggaggaattcagattccagggtgtggaagtggctttgtggtgccacctctaaccgctcggaggtcaacccccattctacaccgaaaactaggccttggctgctatggaaggacagcggcaagaaagccacgcaaccctaacactcgcccaggctcatttcaacaatggagagtacgcggaggccgaggcactgtactccgcttacattcgccggtgcgcttgcgcggcctccagcgacgagagtcccgggagcaaatgcagccctgaggatttggctactgcatataacaacagggggcaaatcaagtacttcagggttgatttttatgaagccatggatgactacacatctgccatagaagtccaacccaattttgaagttccatattacaacagagggttgatactgtataggctgggatattttgatgatgctttggaagatttcaagaaggtcttagacttaaatcctggatttcaagatgctactttgagcttaaaacagactattctagacaaagaagaaaaacaaagaagaaatgttgcaaaaaattattgatatttttaacttaatggaagtattgattcatgatccttacatctgcatctagttatcagtaatttagatattgagctattttgatttatatttaagaaattaatacattagcactgaaagttaaatagtgtgtttaaggtagttaatttcaggttgaatgggttttttttaatgaagtgtaaataataccaatgtataagtgtatattattatattaaatattatagtaaaaaaaaaaaaaaaaaa

SEQ ID NO: 140 - DNA, 456 bp, Homo sapiens
  CDS (49)..(222)
gaattcccgggtcgacgatttcgtggacgttgtctgcaggcactcagaatggtccagcgtttgacataccgacgtaggctttcctacaatacagcctctaacaaactaggctgtcccgaacccctggtaatagaattgtttacctttataccaagaaggttgggaaagcaccaaaatctgcatgtggtgtgtgcccaggcagacttcgaggggttcgtgctgtaagacctaaagttcttatgagattgtccaaaacaaagaaacatgtcagcagggcctatggtggttccatgtgtgctaaatgtgttcgtgacaggatcaagcgtgctttccttatcgaggagcagaaaatcgttgtgaaagtgttgaaggcacaagcacagagtcagaaagctaaataaaaaaatgaaacttttttgagtaataaaaatgaaaagatgctgtaaaaaaaaaaaa

SEQ ID NO: 141 - DNA, 1341 bp, Homo sapiens
  CDS (947)..(1267)
aggatggcccctctgcccatgtttcctcccaggaagagcgggcagagtggcccagccccaggcagtgcttcctgagcagaccacccggactgtctttcctccacccgcccatggagaaagagcacgcccggccccgccctgtgctcacctctgcctggctcagtgaccttctcaggcattctgccctcctgggcccctctctccctgaaggggctttgtggcatctctggaagagcagggtgtgctgcactcatgggcctggtctcactccttggacttgtcaccttgtgacatttggcttaccagcatttgagaaggctctgctgggtctccatggtgggggtctctcaccttcttgaccctctctccatcattcagctgccagcccaggcttcacacccaagctggctcagcagccgagcctggcaccgagggtccctgcaggctccctgggcagggagagggccaaggacaattgggagggcagcaggcagcccgcagatggtggccatgtggcacgctgctgagacgacactaccaataaaccaaactgccacgcacacactgcaggctcacacccgcacacctggtcctggcttgtggagggacttgcactggaggtattgctctggcttgcctggggaagtgtcacagatgtgcacatgggccacactcagtgctgtggcctggcctgccgtagcctcacacatctgcctcaagagccagcagcaaacagctttgtggcatccttggaggttcccagtgactgagaggcctgggcagcactaaggcccctgctctgctccctggcataggccttggcctccttgcacagactctcctgacagtctggcctcctcccacctcagaggtcctctggccaccaatttatactctcttcccaagctgatcctgaaggcaggcagagcagctaggggctggtaacatgtattcccatcccgtgtcctcactggtgtgtctcctggccatgggcaagggactcgggtcatcccaggccctggtccagccagacacctggccccacacctcccaccaggctgctgttgctcagaaggagaatactgcagctgtatgcatccccgtgtgtcttgggcccagctcgctgggtcagtctgctcctgtcccctccagcatgcactgcctaggtcagcacaggttcctgatccatggtgtagttagcccttcccacctggcaggacggcccagaccaccagccaagcagggaaagggggctcgtcttgacgggtgaagagaccaccgacatggtcgtagtccagcatatattgatggccctcttccggcgcggggcacgactccctc

SEQ ID NO: 142 - DNA, 4465 bp, Homo sapiens
  CDS (543)..(1796)
ggtgagaatccaatatggagtaaatcggtggagtcgagagatggggctcggacggggcgccctgcaccgcctcccaggcgcacctcccccggccgccgaccgctccccggaaccgtgattggcccggccccccgggggcgaccccggactgagcccccccacccgcggccggcgctctcctcctcctcgcagcagtccctgccgctccgaggcgcgcttgtttttctcctgctctcccccaccgccgtccccttcccaaatctcgccccctctgcccgctcccgagcccccggagcctccgcccgcctctccccacggcgctgcggcgttcactccccgcgcagcctgcctttgcaccccttcccccaaaccctatcccgcgccctgcttccccttctgctgcggcgccctcttcatctctagccgccccccctccccaaatcaggcgatctccggagatgtgaagaaggggggcgagcggacaggaagatgaagggagcaaagctgcccgccgcgggacaggcgtctaggtgaacaagaaaatgaccgaagaaacacacccagacgatgacagctatattgtgcgtgtcaaggctgtggttatgaccagagatgactccagcgggggatggttcccacaggaaggaggcgggatcagtcgcgtcggggtctgtaaggtcatgcaccccgaaggcaatggacgaagcggctttctcatccatggtgaacgacagaaagacaaactggtggtattggaatgctatgtaagaaaggacttggtctacaccaaagccaatccaacgtttcatcactggaaggtcgataataggaagtttggacttactttccaaagccctgctgatgcccgagcctttgacaggggagtaaggaaagcaatcgaagaccttatagaaggttcaacaacgtcatcttccaccatccataatgaagctgagcttggcgatgatgacgtttttacaacagctacagacagttcttctaattcctctcagaagagagagcaacctactcggacaatctcctctcccacatcctgtgagcaccggaggatttataccctgggccacctccacgactcataccccacagaccactatcacctcgatcagccgatgccaaggccctaccgccaggtgagcttcccggacgacgacgaggagatcgtgcgcatcaacccccgggagaagatctggatgacggggtacgaggattaccggcacgcacccgtcaggggcaagtacccggacccctcggaggacgcggactcctcctacgtgcgcttcgccaagggcgaggtccccaagcatgactacaactacccctacgtggactcctcagactttggcctaggcgaggaccccaaaggccgcgggggcagcgtgatcaagacgcagccctcccggggcaagtcgcggcggcggaaggaggacggagagcgctcgcggtgcgtgtactgcagggacatgttcaaccacgaggagaaccgccggggccactgccaggacgcgcccgactccgtgagaacttgcatccgccgggtgagctgcatgtggtgcgcggacagcatgctctatcactgtatgtcggaccccgagggagactatacagacccttgctcgtgcgatactagcgacgagaagttttgcctccggtggatggctcttattgccttgtctttcctggccccctgtatgtgctgttacctgccccttcgggcctgctaccactgcggagtgatgtgcaggtgctgtggcgggaagcacaaagcggccgcgtgactcagtttccctcccttctccctccatccgcagccacaggggaactcgtctcttacatactctcatcttctcccccgctcccttccactccaaggagcgaggagggcaagcggcctcccagctccctggtacctcgaggcaccattccagccagggacgctgccgggtagactctccactccccctgccgcccacactgcagcagccacatccatacacacacgctcgcacagtgttctgaggaaggaaccttcgccacagactcctgtactattaacaatctgtaaccaagctaactgtctcatccatgtgttgatttcctgtttcctcctcccccgcctcttccagttcaaaggagtctgcaattggaactgctgattttcggtgggttttgtagttgatttttccaagagcgtcgaagactctctttctcttggttcaccttgcctgtcgctagcaagcatctggttcagcggaaatgggatgtgagaatgatgaaacccgacagaagtatctcagcctgcagtcagttattatgtataggaggtgagctagttaacaaacttgtaccacaaaacaatatcgctttaacttttctaaagccaaatttcccatgtaagctgcagtttctatctttagcccatcatcattttctgcccccccaaaatctgttgaaatgattcactgatgcaaaacattcacccgtaatagactgagaattgagccttaacttcagattaacttgtgagaatcaggaaaattccttcaactgcattgcatcctcttggaccagggctagaatggggatttcaggtttctatgagcctccccattacccctaaagtagaacattttttaaattgtgttgccaccacttctaaaaatttagcaatattagaataggatactagtgaagtaagaaattttgcttgttgttttgcaaaccaaatagtttcctcaaacacaaatcagtgttcccacgaacaagttccagttgagaaacactaaggttatggtgaataaaaccatagggagcttcttccccccaacccctggctattttatattaatggggagaggggatttttaaatgtcataaatttgaagagtggtgggttgcattttcttcatgggtttatgttttcgtttcattttggactcaatttcacatcaccaaattcctcatttatacttggggaaaaaacaaggccatatgtaaaaacccttccaatgcctaagtgtctttctcctgcaactccaaacccagactcgccactttgggtgcacaggtggttaggtcagccaactggttctgcctgtcgccttgccacggaggaggcttctaattagctggaaaagagtatttttctaatacgttgcaaggattagccaaatcttcttattgaagaaagaagaaaagtgaagagtggttacctatacctagcatagtacaatcagaacctcgtggagaccaccggggacaggcttgcggacgccggctgttcttcccgccacgatctttctgtggtagcggccagcagaagacatggcctgctccccactccctttccccactccttctttattgcacacaggacaccagtcttcaaggaaagggacttttttccagtctgccaatcatattgggaaagtgctagctgtgctcaccttcatggggctgtttccagctcgtccacaagctcatcgattttctttagtagattaccggtgtaaatacccagtgtgcttatgagtcagttagtagacgtcttcattcattggagtaactggtttaggctttccagtttggaaaaggagcagagagctgtccatctggattgatggaagaaaagagaacctcatccatgcctggagaacatctagaaaaccttcagccagcctccagtgctgtcgagagaccaccttcccccgacccggaggcacttccttggggtctttctctagggtctcctctctacaaagcacaacactaatgttcgtttccttagacctcagttcaagtgcccctatttatttcaataagaacgcacatatcccagctgttttttgtttgtcacctctatttagttgttacctgtttctctcttctttcaccccctgtccttttccacccttttaagagttacgctagcagatcttactccacgtatactttttggtttgtgaaggcatcggttaagggcacaaagacagccatggggacatttatgtaaatacgtctctaattgccacactgcagctgaacagtgtgtagtattttcccagtcagctttgccatactgacgtcaatcatttgagagaaattattcagattttatttttgtatctgtggtaacaaaacattaaccaaaagattttctgtccagaagcctccccgaccccccaagctatttgctcacattaacaaattaaagtgcctgaagcataattcattctttacctgtatactaaaaaccctgttgtattgatttttttataataagcctttttacctctgtgtaaaaaatatatatacaagtgtatgatgtacattttagttcttaactttttttttatggtttctaatatgtatgaccaatgtagccattgctttaaaatgtaccgtgtaaatataaacacatcctatcagaaaaaaaaaaaaaaaa

SEQ ID NO: 143 - DNA, 1760 bp, Homo sapiens
  CDS (458)..(937)
ggggggtagcagggggagagaaagagaacgaagggagacagagagactgagacagaaacaaagagggcggacgcagtgcagtaagagcagatgggcggacccaaatttcttcggcttcacgattttgcggaggtctagccctgcatccagccttgaaacagggtggggaggaggcagaaaggggagggactgcactccctctgagcgtgctagctccgactgcctgacggatcacccttccgctccaacatggctagttcctcaacgccgtgactcaagcctgttgtgccagcaggcgcactcagcagcgaccctcataggtggcgaaggtccgcgagagggttccgccaggctagacagtggagtgccgcacagcgcgccttccagcctcgcagccgccaccctagcggttccgacccggcgccacaggcctgcttggtcgatcttcgagccaaagatgcggcgaggctggaagatggctctgtctggggggctgcggtgctgccgccgggtactgtcctgggtgccagtgctcgttattgtcctcgtcgtgctctggtcctactatgcctacgtctttgaactctgcctggtgactgttttgagcccagcagaaaaagttatttacctcatactctaccatgccatctttgtgttctttacctggacctactggaagtctatctttacactcccacagcagccaaaccagaagttccacttgtcctacacagacaaggagcgctatgaaaatgaagaaagacctgaggtccagaagcagatgcttgttgatatggccaaaaagctaccggtttacacaagaactggaagtggagctgtacgattctgtgaccggtgtcatctgatcaagccagaccgctgccaccactgctctgctgtgctatgtgtgtgttatggatcatcactgcccttgggttaataactgcattggattttccaactacaaattcttccttcaattcttagcttactctgttctctactgcctgtacattgctacgacagtcttcagctatttcatcaaatactggagaggggaattacccagtgttcgctctaagttccatgtcctttttcttctctttgtggcctgcatgttttttgtcagccttgtgattctctttggttaccattgttggcttgtcagcagaaacaaaaccaccttagaggccttctgcactccagtgtttacaagtggcccagagaaaaatgggttcaaccttggcttcatcaagaatatccagcaggtgtttggagataagaagaagttctggttaatacctattggttccagccctggtgatggacactccttccctatgaggtctatgaatgagtcacagaacccactgctagcaaatgaagaaacctgggaagacaacgaggatgacaaccaaggccctagggctctacaatcagcaggttgcaaagccagccaggtttctgttcttcccttctgggtggcgaattcccccaggttccaggcagttccagagatgccatctgggagtcagcacttagatttagaaatcttaagtatcaacctggtgctctgttccaatgtggctgagcaggcaccaaagccagaagacaaagtccttttcactcttccctcccctttccacaaatacacagttatctcgctgtggccactactgccccaggcccacagcacctactgcctggctactggcaatgttcactcaaggcccaagggctcttcaataagggtatggtga

SEQ ID NO: 144 - DNA, 241 bp, Homo sapiens
  CDS (86)..(238)
ctactaaattcgcggccgcgtcgaccagttgtacagggatgccatcaggttcctcctgtgccttgtaggaacagccaccattgggatgatccatactctgtgtgtctatgtgcttagtggggaacctccagaggaggtggtgaggaaagcccttgacgtcatcacaattgcggttcctccagctctacctgctgctctgaccacaggcattatgcatgcccagaggaggctgaagaagtga

SEQ ID NO: 145 - DNA, 865 bp, Homo sapiens
  CDS (196)..(741)
ggcatcttctgcattagcccccagaggatcaacgtatgtggacagttaaaccttgtctgctttgacaagacaggcaccttaacaagggacggcttggacctctggggagtcgtgtcctgtgataggaatggctttcaggaagttcacagctttgcctcaggccaggctttgccatggggcccactgtgtgcagcgatggccagctgccactctctgatccttcttgatgggaccatccagggagaccctctggacctcaaaatgtttgaagccaccacctgggaaatggctttttctggggacgatttccacatcaagggagtgccggcacatgccatggtagttaagccctgcagaacagccagccaggtcccagtggagggaattgcaatcctgcatcagttcccattctcatcggcactgcaaagaatgacagtcattgtccaagagatgggaggtgaccgactggcattcatgaaaggtgcaccagagagggtggccagcttttgccgacctgagacagtacccactagttttgttagcgaacttcagatttacacgacacagggcttccgagtcatagcactggcctacaagaagctggaaaatgaccatcacgctactaccttgacgagggagacggtagaatcagacctgatatttctggggctgctgatcttggagaatcgatttgaaggaagagacaaaacctgtcttggaagagctcatttccaccccgaataaggactgtaatgatcacaggtgacaatcttcagactgcaataacagtggccagaaaatctggaatggtttctgaaagccagaaagtcattctcattgaggcaaatgaaccgcagttaaaacc

SEQ ID NO: 146 - DNA, 920 bp, Homo sapiens
  CDS (135)..(785)
tttcgtggatggagccctcctcctgatcctgtagtggtagtaagaatcaccagcgcgggcaaggagtacggacgggagtcagaggcagagcgagggtgtgtggagggccggcggggaccgccgggagcgcgcggatgtcggtgttcctggggccagggatgccctctgcatctttattagtaaatcttctttcagctttactcatcctatttgtgtttggagaaacagaaataagatttactggacaaactgaatttgttgttaatgaaacaagtacaacagttattcgtcttatcattgaaaggataggagagccagcaaatgttactgcaattgtatcgctgtatggagaggacgctggtgacttttttgacacatatgctgcagcttttatacctgccggagaaacaaacagaacagtgtacatagcagtatgtgatgatgacttaccagagcctgacgaaacttttatttttcacttaacattacagaaaccttcagcaaatgtgaagcttggatggccaaggactgttactgtgacaatattatcaaatgacaatgcatttggaattatttcatttaatatgcttccctcaatcgcagtgagtgagcccaagggcagaaatgagtctatgcctcttactctcatcagggaaaagggaacctatggaatggtcatggtgacttttgaggtagagggtggcccaaatccccctgatgaagaattgagccagttaaaggaaatatcacctttccccctggcagagcaacaggaatttataacttgacagtactcgatggacaggttggctaatttacatacccaatgggaacaggattctgggttgcggacacaccctgtttaacttaatggatggggccgccgcccctcctataatagctgctggctggatcactcg

SEQ ID NO: 147 - DNA, 2214 bp, Homo sapiens
  CDS (139)..(2064)
gctgatgcagtttctgcaggactgtaaactggattcctggaacctttgatattcctggctgtgtatagtgcctgttggtggactgtactgatactcaactagagtgtgaagggactggattcctgcccctgagacacaatgcaagctgtagtgcccttgaacaagatgacagccatctcaccagaacctcaaactctggcctcgactgaacaaaatgaggtcccaagagtggttacttctggggaacaagaagctattttaagaggaaatgctgctgatgcagagtctttcagacagaggtttaggtggttttgttactcagaagtagctggacccaggaaagctctgagtcaactctgggagctctgcaatcagtggctgagaccagacattcacacgaaagaacagattttagagcttctggtgtttgagcagttcctgaccattttgcctggggagatcaggatttgggtaaagtcacaacatcctgagagtagtgaggaagtggtgaccctaatagaagatttgacccagatgcttgaagaaaaagatgaatcagctttagataaaataatagaaaggtgcctcagggatgatgatcatggcttgatggaagaatcccagcctatattgtggcagctcagagagaggatcacggtaatcagggaaatacaacaggaagagtcgcacaaaacaaaactcttgggagtggcagtaggggtaagaaatttagacccagataaaagccccttaggacataatttcaaagaaacttcagacttaattaaacatctgagagtctacttgaggaagaaatctcggaggtataatgaaagcaagaaacccttcagttttcattcagaccttgttctgaaccgcaaggagaaaaccgccggagaaaagtcacggaaatctaatgatggtgggaaagtcctgagtcactcttcagctcttactgaacatcagaaacgtcagaagattcatttgggggataggtcccaaagatgcagtaagtgtgggataatctttattagaagatcaactctttctaggcgaaaaacccctatgtgtgagagatgtcggaacgactcatatccagaagcagccttaaataacgatgcgggaaatgagagtggagaaaaaactcataaatgtagtaagtgtggaaaagcctttggctatagcgcctcactcaccaaacatcggagaattcacactggagaaaaaccctatatgtgtaatgaatgtggaaaagcttttagtgatagttcatcgctcacaccacatcatagaactcatagtggagagaaacccttcaaatgtgatgactgtgggaaaggtttcaccctaagtgctcacctcattaaacatcagagaattcatactggagaaaaaccttataaatgtaaagactgtgggagaccctttagtgacagttcatctcttattcaacatcagcgaattcatactggagaaaaaccctatacatgtagcaattgtggaaaatccttcagtcatagctcatccctttccaaacatcagagaattcatactggagagaaaccctataaatgtggcgaatgtggaaaagcctttaggcagaattcatgccttacccggcatcagagaattcacactggagaaaaaccatatttgtgtaatgattgcggaatgacttttagccattttacgtctgtgatttatcatcaaagacttcattcaggagaaaaaccctacaaatgtaaccagtgtgagaaagccttcccaacccattcactgctaagtcgtcatcagagaattcatactggtgtaaaaccttataaatgtaaagaatgtgggaagtccttcagtcagagttcatctcttaatgagcaccaccgaattcatacaggagagaaaccctatgagtgtaactattgtggtgcaacctttagtcgaagctcaatccttgtagaacacctaaaaattcataccggaaggagagaatatgaatgtaacgaatgtgagaagacatttaaaagtaattcaggcctcattagacatcggggatttcactctgcagagtaatcctggaactacattaaagtggggggaatttaattcaaattgtcaggtactgaaaccatgggatgtagaacataccggattgatcaggagctgcagctatcgtaaattggcagttgcgaacagaactctctagctcattcatacctc

SEQ ID NO: 148 - DNA, 618 bp, Homo sapiens
  CDS (66)..(344)
gcacgagcaacagcttgcggctgcggggagctcccgtgggcgctccgctggctgtgcaggcggccatggattccttgcggaaaatgctgatctcagtcgcaatgctgggcgcaggggctggcgtgggctacgcgctcctcgttatcgtgaccccgggagagcggcggaagcaggaaatgctaaaggagatgccactgcaggacccaaggagcagggaggaggcggccaggacccagcagctattgctggccactctgcaggaggcagcgaccacgcaggagaacgtggcctggaggaagaactggatggttggcggcgaaggcggcgccagcgggaggtcaccgtgagaccggacttgcctccgtgggcgccggaccttggcttgggcgcaggaatccgaggcagcctttctccttcgtgggcccagcggagagtccggaccgagataccatgccaggactctccggggtcctgtgagctgccgtcgggtgagcacgtttcccccaaaccctggactgactgctttaaggtccgcaaggcgggccagggccgagacgcgagtcggatgtggtgaactgaaagaaccaataaaatcatgttcctccaaaaaaaaaaaaa

SEQ ID NO: 149 - DNA, 2274 bp, Homo sapiens
  CDS (155)..(1912)
agcatcgttgctgggtatgaagttgttggctccagcagtgcatctgaactgctgtcagccattgaacatgttgccgagaaggctaagacagcccttcacaagctgtttccattagaagacggctctttcagagtgttcggaaaagcccagtgtaatgacattgtctttggatttgggtccaaggatgatgaatataccctgccctgcagcagtggctacagggggaaacatcacagccaagtgtgagtcctctgggtggcaggtcatcagggagacttgtgtgctctctctgcttgaagaactgaacaagaatttcagtatgattgtaggcaatgccactgaggcagctgtgtcatccttcgtgcaaaatctttctgtcatcattcggcaaaacccatcaaccacagtggggaatctggcttcggtggtgtcgattctgagcaatatttcatctctgtcactggccagccatttcagggtgtccaattcaacaatggaggatgtcatcagtatagctgacaatatccttaattcagcctcagtaaccaactggacagtcttactgcgggaagaaaagtatgccagctcacggttactagagacattagaaaacatcagcactctggtgcctccgacagctcttcctctgaatttttctcggaaattcattgactggaaagggattccagtgaacaaaagccaactcaaaaggggttacagctatcagattaaaatgtgtccccaaaatacatctattcccatcagaggccgtgtgttaattgggtcagaccaattccagagatcccttccagaaactattatcagcatggcctcgttgactctggggaacattctacccgtttccaaaaatggaaatgctcaggtcaatggacctgtgatatccacggttattcaaaactattccataaatgaagttttcctatttttttccaagatagagtcaaacctgagccagcctcattgtgtgttttgggatttcagtcatttgcagtggaacgatgcaggctgccacctagtgaatgaaactcaagacatcgtgacgtgccaatgtactcacttgacctccttctccatattgatgtcaccttttgtcccctctacaatcttccccgttgtaaaatggatcacctatgtgggactgggtatctccattggaagtctcattttatgcctgatcatcgaggctttgttttggaagcagattaaaaaaagccaaacctctcacacacgtcgtatttgcatggtgaacatagccctgtccctcttgattgctgatgtctggtttattgttggtgccacagtggacaccacggtgaacccttctggagtctgcacagctgctgtgttctttacacacttcttctacctctctttgttcttctggatgctcatgcttggcatcctgctggcttaccggatcatcctcgtgttccatcacatggcccagcatttgatgatggctgttggattttgcctgggttatgggtgccctctcattatatctgtcattaccattgctgtcacgcaacctagcaatacctacaaaaggaaagatgtgtgttggcttaactggtccaatggaagcaaaccactcctggcttttgttgtccctgcactggctattgtggctgtgaacttcgttgtggtgctgctagttctcacaaagctctggaggccgactgttggggaaagactgagtcgggatgacaaggccaccatcatccgcgtggggaagagcctcctcattctgacccctctgctagggctcacctggggctttggaataggaacaatagtggacagccagaatctggcttggcatgttatttttgctttactcaatgcattccagggatttttttatcttatgctttggaatactcttggacagtaagctgcgacaacttctgttcaacaagttgtctgccttaagttcttggaagcaaacagaaaagcaaaactcatcagatttatctgccaaacccaaattctcaaagcctttcaacccactgcaaaacaaaggccattatgcattttctcatactggagattcctccgacaacatcatgctaactcagtttgtctcaaatgaataaggcaaggaatcataaaatcaagaaaaaatttccagaacaacttgacatttagagacaaatgtcaatgaagaaattatgctcagtattcgatcgggttttctgatttaggggtctgggaataaaacaagaatgtctcagtggcttcaaaaaaaaaaaa

SEQ ID NO: 150 - DNA, 1445 bp, Homo sapiens
  CDS (656)..(814)
cagtcgcatccagccatgacagccttctgctccctgctcctgcaagcgcagagcctcctacccaggaccatggcagccccccaggacagcctcagaccaggggaggaagacgaaggtgcgccctcccactgggaatgggggaatagagcctacccagcttcttctaggaaggatgtgtgcccctccccagcacacagagtgagcgccaggaaaattctcacttcctctcttccttggctgcctttggtcacccctcctggtctgatctcagggtgattttttccatgatatgaacacacacatacacacaccatatgtgtgcacacagagagaatgaaacagctgccttcctaaggggctccgtcactgcccccgcttctcccttggggcagggagtatgactcctcctttccttctgcccagaagtgtgtgtagggaggggacactaagccagctccagacccttgtcccacccagcttccagtccatccacagacctcaccccccacttccatgtgctgtctgcaggggacatcctaagcctcacgacctgcacacgcctgggattttcaggctctctgatcaggtctgagggccagggagggttggctgggtgtttgctgagtgactcacagaaagtccgtctctctcagggatgcagctgctacagacaaaggactccatggccaagggagctaggcccggggccagccgcggcagggctcgctggggtctggcctacacgctgctgcacaacccaaccctgcaggtcttccgcaagacggccctgttgggtgccaatggtgcccagccctgagggcagggaaggtcaacccacctgcccatctgtgctgaggcatgttcctgcctaccatcctcctccctccccggctctcctcccagcatcacaccagccatgcagccagcaggtcctccggatcactgtggttgggtggaggtctgtctgcactgggagcctcaggagggctctgctccacccacttggctatgggagagccagcaggggttctggagaaaaaaactggtgggttagggccttggtccaggagccagttgagccagggcagccacatccaggcgtctccctaccctggctctgccatcagccttgaagggcctcgatgaagccttctctggaaccactccagcccagctccacctcagccttggccttcacgctgtggaagcagccaaggcacttcctcaccccctcagcgccacggacctctctggggagtggccggaaagctcccgggcctctggcctgcagggcagcccaagtcatgactcagaccaggtcccacactgagctgcccacactcgagagccagatatttttgtagtttttatgcctttggctattatgaaagaggttagtgtgttccctgcaataaacttgttcctgagaaaaaaaaaaaaaaaaa

SEQ ID NO: 151 - DNA, 497 bp, Homo sapiens
  CDS (52)..(363)
agtaggagcatctcagagcagagtgagctgcggtcatgattgaaggcagggatgctagcagcaaggaccccaaagaattatcagcattggggcccaaacttccccccaggctgggggaaactggacttcctgacatcaactaaccaggcgacatcctggataggcctcttcaaagatggccaaggaagtgcccacaggtggatggatggctcagcccccacctacataaactgggactccaggaaattggatgataatggaaccaccccagcctgtgtgatgatgctctaccagggacactggagcaactcctcttgcaaatcagagtctcctgtttacatctgtgagaagaggcagagctgctgacctaggcccctaccccataagattggtgtaaacctcttgttgtgcatcctcaacctccatccctgccctctttgggctttgaatccccagaggcaacaataaaggacgtttctccaaaaaaaaaaaaaaaa

SEQ ID NO: 152 - DNA, 3032 bp, Homo sapiens
  CDS (1)..(2814)
atggagaaccggcctgggtccttccagtacgtccctgtgcagctgcaagggggggcaccctggggcttcacccttaaggggggtctggaacactgtgagccgctcacagtgtctaagattgaagatggaggcaaggcagctttgtcccagaagatgaggactggtgatgagctggtgaatatcaatggcactccattatatggctcccgccaagaggccctcattctcatcaaaggctccttccggattctcaagctgattgtcaggaggaggaacgcccctgtcagtaggccgcactcatggcatgtggccaagctgctggagggatgccctgaagcagccaccaccatgcatttcccttctgaagccttcagcttgtcctggcattctggctgcaacacaagtgacgtgtgtgtgcagtggtgtccactctcccggcattgcagcaccgagaaaagcagctccattggcagcatggagagcctggagcaaccaggccaagccacctatgagagccatctgttgcctattgaccagaacatgtaccctaaccagcgtgactcagcctacagctccttctcggccagctcaaatgcttctgactgtgccctttccctcaggccagaggagccagcctctacagactgcatcatgcaaggcccagggccaactaaggcccccagtggccggcctaatgtggctgagacctcaggaggtagtcggcgcaccaatgggggccacctgacccccagctctcagatgtcatcccgtccacaggagggataccagtcagggcccgccaaagcagtcaggggcccaccacaacctccagtgaggcgggacagccttcaggcctccagagcccaactcctcaatggagagcagcgcagggcatctgagcctgtggtccccttgccacagaaggagaaactgagcttagagcctgtgctacccgcaaggaaccctaataggttctgttgcctcagtgggcatgaccaagtgacaagtgagggccatcagaactgtgagttcagtcagcctcctgaatccagccaacagggctctgagcatctactgatgcaggcctcaaccaaagctgttggatccccaaaagcctgtgacagagcttccagcgtggattccaacccactcaatgaggcttctgcagagctagctaaggcttcttttggcagacctccacatctcataggacccacagggcatcgccatagtgcccctgaacagctgctggcatcccacctgcagcatgtgcaccttgataccaggggcagcaaagggatggagctcccacccgtacaggatgggcaccagtggactctgtcccctttgcacagcagccacaaagggaagaaaagtccatgcccccctacaggaggaacccatgaccagtccagcaaagaaagaaagaccagacaagtggatgacaggtctttagttttgggacaccagagccaaagcagtcccccacatggagaggctgatggacacccctcagaaaaaggtttcctggacccaaacagaacaagcagagcagccagtgaattggccaaccagcaaccctctgcctctggctcccttgttcaacaagccacggactgttcttcaaccactaaagcagctagtggcacagaggcaggtgaagaaggggacagcgagcccaaggagtgcagccggatgggtggtaggcgaagtggagggacccggggccgctcgatccaaaaccggcggaagagtgagcgttttgctaccaatctgcgtaatgaaattcagaggaggaaggcccagctccagaaaagcaagggtcccttgtcacagctgtgtgacactaaggagccagtggaagagacccaggagcccccagaaagtcctccactcactgcctttaacacatctcttctatcttcatgtaaaaaacctcccagccccagagacaagctcttcaacaaaagcatgatgctcagagctaggtcttccgagtgcctcagccaagcccctgagagccatgaatctaggacaggcttagagggacgaataagccctggccagaggcctggccagtcctctttgggcctgaacacctggtggaaagcacctgacccatcctcctcagaccctgagaaagcacatgctcactgcggagtccgtggaggtcattggagatggtctccagagcataattcacagccacttgtggcagcagccatggaaggcccttccaacccaggtgacaacaaggaattgaaggcttctactgctcaagctggggaggatgccatcctcttgccttttgcagacagaagaaagttctttgaagagagtagcaaatccttatctacatctcatttgccaggtttaaccactcatagcaacaagacttttacccagagaccaaaacctatagaccaaaacttccagccaatgagctccagctgtagggaattgaggcgccatcccatggaccaatcatatcattccgcagaccaaccatatcatgccacagaccaatcatatcattccatgtcaccccttcagtcagaaactcccacttactcagaatgttttgcaagcaaaggtctagaaaattccatgtgttgtaagccactacactgtggtgattttgattaccacaggacctgctcttactcctgcagtgttcaaggagctctagtccatgatccttgcatttattgttctggggaaatctgccctgccttgctaaagagaaatatgatgccattgctacaactgccggtgccaccaccaccaatgcattcggtgttcagtttgctatcataatcctcagcacagtgccctcgaggacagcagcttggcacctggcaacacttggaaacccaggaagctgacagtgcaggaatttcctggggacaaatggaatccaataacaggaaacaggaagaccagccagtcagggagggaaatggctcattccaagactagcttttcatgggcaacccctttccatccttgccttgagaacccagcactggact

SEQ ID NO: 153 - DNA, 3017 bp, Homo sapiens
  CDS (306)..(2708)
gaattcccgggtcgacgatttcgtgccgcgagcaggggtgaagagacccagcggtgcaccagccgcccagtgggggaggcagctacgtgagcaggacgcccgccctggagcagttaggaccgaaggtctccggagagtcgccggcggtgccaggaagtcaacttcaagcagattgacttgaaacgggatctcatttaggaagcataagtgtccaatcaaaaactgtgtatttttttaaatttggaaaatactcaagttccagttgcttatcattctccttcactttctgaaaacctggcaatcccatgtggacttctggtagaatgagcaatgcaaagaactggcttggacttggcatgtccttgtacttctgggggctgatggaccttacgaccaccgttctctcggacaccccaacaccacaaggtgaattagaagcactcctgtcagacaagccacagtcacatcagcggaccaagaggagctgggtttggaaccagtttttcgttctggaagagtacactgggaccgaccctttgtatgtcggcaagcttcattcagatatggacaggggagacggatccatcaaatacatcctctcgggagaaggtgctggcatcgtgtttaccatcgacgacaccactggagacatccacgccattcagaggctcgaccgagaggaaagagcccagtatactctaagggctcaagccctagacaggcggacgggcaggccaatggagcccgagtcagagttcatcatcaaaattcaagacatcaatgacaatgagcccaagttcctggacggaccttatgtggccactgtgccagaaatgtcccctgtgggtacctccgtcatccaagtgacagccacagatgcagatgacccgacctacggcaacagtgccagggtggtgtacagcattcttcagggccagccatatttttctgtggactctaaaacaggtgtaattaggacagcgctcatgaacatggacagagaagccaaagaatactacgaagtgattatccaagccaaggacatgggagggcagcttggaggattagctgggaccacaacagtcaacatcaccctctcagatgtcaatgataacccaccccgctttccccagaaacattaccagatgagtgtgttggaatcagctccaattagctccactgtcgggagagtgtttgccaaggacttggatgaaggcatcaatgcagagatgaaatatactattgtggatggagatggtgcagatgcctttgacattagcacagatcccaatttccaagttggtatcataactgtgaagaagcccctgagttttgaaagcaagaaaagctacaccttaaaggtggagggagccaatcctcacctagagatgcgttttctgaacttgggcccatttcaggacacaacaacagtgcacatcagtgtggaagacgtggacgagccccctgtgtttgaacctggcttttactttgtggaggtgcctgaggatgtggcgattggaacaaccatacagatcatttctgccaaggacccagatgtgaccaacaactcaatcagatactccattgatagaagcagtgaccctggaagatttttctatgttgacattacaacaggtgccctaatgacagcaagacccctagaccgggaagaattttcttggcataatatcactgtccttgctatggaaatgaacaatccctcccaggttggaagtgttcctgtcacaatcaaagtcttagatgtgaatgacaatgctccagagttccccagattctatgaagcttttgtctgtgagaacgccaaggcaggacagctgatccagacagtgagtgcggtggaccaagatgacccacgcaatggtcagcatttctactacagcttggctcctgaggctgctaacaaccccaactttaccataagggacaaccaagataacacagcacggattctaaccaggaggtctggtttccggcagcaggagcagagtgtctttcacctgcctatcctgatagcagatagcgggcagcccgtgctgagcagcacaggcacactgaccatccaagtgtgcagctgtgatgacgacggccacgtcatgtcctgcagcccagaggcctacatgctcccagtcagtttgagccggggccccctcattgccatcctcgcctgcatctttgtcctcctagtgctggtgttgctcattttgtccatgaggcggcaccggaaacaaccatacatcatcgacgacgaggaaaacatccacgagaacatcgtccgctacgacgacgagggcggcggcgaggaggacaccgaggccttcgacatcgcggccatgtggaacccccgggaggcgcaggcgggggccggccccaagacgcggcaggacatgctgcccgagatcgagagcctctcccgctacgtgcctcagacgtgcgcagtgaacagcactgtccacagctacgtgctggccaagctctacgaggccgacatggacctgtgggcaccgcccttcgactccctccagacgtatatgttcgagggggacggctctgtggcggggtcgctgagctccctgcagtcggccacgtcggactcggaacagagcttcgacttcctgacggactgggggccccgcttccggaagctggccgagctctacggggcgtcggagggacccgcgccgctgtggtgacggaagccaggaggcaggcgcgcgtccaaatccagacgttctccgcgggtgcttcgcggacaaggtgcagccaaccacacgagcaatactgtgctggagagtgagaatgggggtgagcaggcgaacagagctctctctggatcagctttacttgggtagattaagttaaataagcaaaaggaaacccataaggaagagggcagaatctttaattaccttttttcttttctttttgatttttgtgacactgtgtgcgaaggcttggagtccaaggtgatctgacggggggggcgtatttatgccatg

SEQ ID NO: 154 - DNA, 233 bp, Homo sapiens
  CDS (34)..(174)
aagttttctggatgcacacactagtaaacacaaatgccaaagacttgccttccaattctctgtctacctctaactcaggctgttgtcttggcacagttaaacaacttttctagcctcaatattttcatcttcaaaatcaaaaataaaatgtattacatatggatctatgacaaatagtgatatattccatgtgcacgttattcattaaacatgaattaaccaatatttaaatc

SEQ ID NO: 155 - DNA, 965 bp, Homo sapiens
  CDS (128)..(925)
tttcgttgaactcatttgacttttctttatcagctgtaccatgtacatgatgtgcaagaggactggggctctgtgtcaaggccagctgggatgctgaggttttgtgttaggaccaagggcaagtctgatggctgttctggtttgccctgcttcatgccatggcctaaaggagtttaggataagaaggggaatgtggagattgtgcctggtttactatttttatccagcctcctcaactttgtatgtattgaggattgatgtcttaaactacacttccaaagatgaggggccttctgctgaagggccacagaggaacaccaggctgggatggattcagggcaagcaagtcactgtgctgggaagccctgtgcctgtgaacgtgttcctcggaggcccctttgctgctcccccgctgggatccctgcgatttacgaacccgcagcctgcatcgccctgggataacttgcgagaagccacctcctaccctaatttgtgcctccagaactcagagtggctgctcttagatcaacacatgctcaaggtgcattaccccaaattcggagtgtcagaagactgcctctacctgaacatctatgcgcctgcccacgccgatacaggctccaagctccccgtcttggtgtggttcccaggaggtgccttcaagactggctcagcctccatctttgatgggtccgccctggctgcctatgaggacgtgctggttgtggtcgtccagtaccggctaggaatatttggtttcttcacatactgtctcccatggccaaaggcttattccacaaagccatcatggagagtggggtggccatcatcccttacctggaggcccatgattatgagaagggtgaggacctgcaggcggttgcacatttctgtggtaacaatgcgtcagactctgaggccctgctgaggtgcctgaggacaaaaccctccaaggagctgctgac

SEQ ID NO: 156 - DNA, 4278 bp, Homo sapiens
  CDS (157)..(3744)
atgatggctgggaccagctgctggtatccttcatgtcctttaataggctccaggatgacgcctgagccaaaggccctacctcctgtggccttggttagagacaccgaaggccagctgtgtcttccccagcagagacaaagaggttggcaggttgtcatggcgaccagaaaggacacagaggaggagcaggtagtcccaagcgaggaggacgaagccaacgtgagggcggtgcaggcccactacctccgaagcccctcccctagccagtattcgatggtctcagatgcagaaacagaaagcattttcatggaacccattcacctctcctcagccattgcagccaaacagatcatcaatgaagaactcaagccaccgggggtcagagcagacgcagagtgtccaggcatgctggagtctgctgaacagctgctggtggaggacctgtacaaccgcgtcagggagaagatggatgacaccagcctctataatacgccctgtgtcctggacctacagcgggccctggttcaggatcgccaagaggcgccctggaatgaggtggatgaggtctggcccaatgtcttcatagctgagaagagtgtggctgtgaacaaggggaggctgaagaggctgggaatcacccacattctgaatgctgcgcatggcaccggcgtttacactggccccgaattctacactggcctggagatccagtacctgggtgtagaggtggatgactttcctgaggtggacatttcccagcatttccggaaggcgtctgagttcctggatgaggcgctgctgacttacagaggacgtttgaccaacgtgggattgaatgggtctgtcggtcgcctgcggcgtaaggagtgtgtcccacctcgctcgcaggtcctggagcgcaccggcagacctcgaggcggagcggggaaagtcctggtcagcagcgaaatgggcatcagccggtcagcagtgctggtggtcgcctacctgatgatcttccacaacatggccatcctggaggctttgatgaccgtgcgtaagaagcgggccatctaccccaatgacggcttcctgaagcagctgcgggagctcaatgagaagttgatggaggagagagaagaggactatggccgggaggggggatcagctgaggctgaggagggcgagggcactgggagcatgctcggggccagagtgcacgccctgacggtggaagaggaggacgacagcgccagccacctgagtggctcctccctggggaaggccacccaggcctccaagcccctcaccctcatagacgaggaggaggaggagaaactgtacgagcagtggaagaaggggcagggcctcctctcagacaaggtcccccaggatggaggtggctggcgctcagcctcctctggccagggtggggaggagctcgaggacgaggacgtggagaggatcatccaggagtggcagagccgaaacgagaggtaccaagcagaagggtaccggaggtggggaagggaggaggagaaggaggaggagagcgacgctggctcctcggtggggaggcggcggcgcaccctgagcgagagcagcgcctgggagagcgtgagcagccacgacatctgggtcctgaagcagcagctggagctgaaccgcccggaccacggcaggaggcgccgcgcagactcgatgtcctcggagagcacctgggacgcatggaacgagaggctgctggagattgagaaggaggcttcccggaggtaccacgccaagagcaagagagaggaggcggcagacaggagctcagaagcagggagcagggtgcgggaggatgatgaggacagcgtgggctctgaggccagttccttctacaacttctgcagcaggaacaaggacaagctcactgccctggaaagatggaagatcaagagaatccaatttggatttcacaagaaagacttgggagcgggagacagcagcggtgagcccggtgcagaggaggcagtaggggagaagaacccctccgacgtcagcctgacagcctaccaggcctggaagctgaaacaccagaagaaggtgggcagtgagaacaaggaggaggtggtggagctcagcaagggggaggactcggccttggctaagaagagacaacggaggctggagctgctggagagaagccggcagacgctggaggagagccagtctatggcaagctgggaggcggacagctccacggccagcgggagcattcccctgtctgcgttctggtctgcagacccctcagtcagcgctgatggggacacgacgtcagtactgagcacccagagccaccgctcccacctgtctcaggctgcaagcaacatagcggggtgttcaacctccaaccccaccacacccctgcctaacctgccagtggggcctggagacaccatttccattgccagtatccagaactggattgccaatgtagtcagtgagacccttgctcagaagcaaaatgaaatgctgctgttgtcccgctcaccgtctgttgcaagcatgaaggcagtaccagcggctagctgcctgggggatgaccaagtctccatgcttagtggacacagcagctcctccttgggtggctgcctgttgcctcagagccaggcaagacccagctctgacatgcagtctgtgctgtcctgcaacaccacactgagctcacccgcggaaagttgcagaagcaaagtgagggggaccagcaagcccatcttcagcctctttgctgacaatgtggacctaaaggaacttggccggaaggagaaggagatgcagatggagcttagggagaagatgtctgagtacaaaatggaaaagctggcctcagacaacaaacgcagctccctcttcaagaagaagaaggtcaaggaagatgaggatgatggtgtgggtgatggggatgaggacactgacagtgccatagggagcttccgatattcttcccgcagtaattcccagaaacctgaaacagacacatgctcctccctggctgtctgtgatcactatgcaagtggcagcagagttggcaaagagatggatagcagtattaataagtggctcagtggcctcaggacggaggaaaaacctcctttccaaagtgactggtctggaagttccagagggaagtacaccagatcgtccctgctcagggagacagagtctaaatcctccagttacaagttttccaaatcccagtcagaggaacaggacacctcctcctaccacgaggcaaatggcaactctgtaagaagcacttcacggttctcatcttcctccaccagggagggcagagagatgcacaagttctccaggtccacgtacaacgagacctcaagttcccgagaggagatcccagagccctacttcttccgccggaccccagagtcctcagaaagggaagagtccccagaaccacagcgcccaaattgggccaggtccagggactgggaagatgtggaagagtcatccaagtcagacttctctgaatttggagccaagaggaagttcacccagagctttatgaggtctgaagaagagggagagaaagagaggacagaaaacagagaagaagggaggtttgcatctggacggcggtcccagtatcggagaagcactgacagggaggaagaggaagaaatggacgatgaagccatcattgctgcttggagacgccggcaagaagaaaccaggaccaagctgcagaaaaggagggaggactgagctggggaaaatctgagaacactgaaagaaaccactcacgttagcatagggctcagggcacacgttgccaccactcatcgcaggatgaggatacagagaagatcttccagaggggcagagccaaaatgagaggtaccaagcataagggcagcagaggtggagtagggaggaggcaaggagggggagaaccatcaatacgaatacgaggtccgaatgctggaccaactgataccattttctgttgctcagcgccctctaagctttggtgtttcacttaatgtatttgacagtgttcatcacaggctagagaggtgagcttggaaaagcactgtagtttgtcagagactccagtttacatccagaaaggccatgaacataggacacgcttctgtctgtagaggcttcatatgagacccagaaagtctatcctatggcaagtctgacctctcctggcaatgctcagttctgattttttttttttaatgttttgagtctccattaaaaatggtatgttggcaaaaaaaaaaaaaa

SEQ ID NO: 157 - DNA, 1225 bp, Homo sapiens
  CDS (132)..(881)
tttcgtctctcgctcccagcgccacggacgcccccgggccgagcggcggtgcgctcccgtgcagacccgtggacagacgcccctggccggtggactctcgagtctcgcttctgcaccctgcgtccccagacatgaatgtgaggagggtggaaagcatttcggctcagctggaggaggccagctctacaggcggtttcctgtacgctcagaacagcaccaagcgcagcattaaagagcggctcatgaagctcttgccctgctcagctgccaaaacgtcgtctcctgctattcaaaacagcgtggaagatgaactggagatggccaccgtcaggcatcggcctgaagcccttgagcttctggaagcccagagcaaatttaccaagaaagagcttcagatcctttacagaggatttaagaatgaatgccccagtggtgttgttaatgaagaaaccttcaaagagatttactcgcagttctttccacagggagactctacaacatatgcacattttctgttcaatgcatttgatacagaccacaatggagctgtgagtttcgaggatttcatcaaaggtctttccattttgctccgggggacagtacaagaaaaactcaattgggcatttaatctgtatgacataaataaagatggctacatcactaaagaggaaatgcttgatataatgaaagcaatatacgatatgatgggtaaatgtacatatcctgtcctcaaagaagatgctcccagacaacacgttgaaacattttttcagaaaatggacaaaaataaagatggggttgttaccatagatgagttcattgaaagctgccaaaaagatgaaaacataatgcgctccatgcagctctttgaaaatgtgatttaacttgtcaaatagatcctgaatccaacagacaaatgtgaactattctaccacccttaaagttggagctaccacttttagcatagattgctcagcttgacactgaagcatattatgcaaacaagctttgttttaatataaagcaatccccaaaagatttgagctttcagttataaatttgcatccttttcataatgccactgagttcaggggatggtctaactcatttcatactctgtgaatattcaaaagtaatagaatctggcatatagatttattggttccttagccatgggaatattgaggctttcacatatcagtgattttaaaacataccgggtttg

SEQ ID NO: 158 - DNA, 877 bp, Homo sapiens
  CDS (241)..(363)
tgctgtgccgcgcatctaggcagcagcttccgcggatcattagccgacgagggagggagccatgaaacatgactaggtaagaagcgagaaacaggggccgtgtggccactgctgacccattctttttccttctttgcgggaccacgggaccccactttctggtcctgtgccccgaaggaagagccagacggcgcaggcgcagtgggcaagcgttgcgccccgggccactcgtaaattccaatgcgcatgtgcgcaggaagtatttataaatctgcaacccaggctgttttgggggtactttttcttgggggtctctgcaggggctgggacgcttgcaggttccttgcagctcccccagcgggctgagttgcagactttgtcatgggagccacgaaggtgcgggacccttgctcccaatccgagggagtcttgcacaaatcttgcgccacgccgccgtcaccagcgtaggaaggggctttgctatcagtattcttgtgtacgacctttggaccccttccctcgcccgggacgttcccgggagacttaggcggtgagggaggtgcagctccacggctggctttcgcagagcggcgaagctgatcttgccttctggttatcaaagaggtcatctacgtcaacccttgggtgtcaccaaggagaaatcttatacccacccacagccactcttgaagcccaagtcttctgactcctaacttgggtctctttttcccttaaaacgaagtcttctgatgtgcttatcgccctaggtgataatataatattaataattcaaccaattatccctgaattattgctgacttttaagtaactatcatcaaataataaaatttgttattaaaattcaaaaaaaaaaaaa

SEQ ID NO: 159 - DNA, 762 bp, Homo sapiens
  CDS (212)..(646)
  misc_feature (1)...(762): n = a,t,c or g
gcacgagctcgcgcngaaccccaaggtgacatccttggtgagacaattgtgggcagcctgacacccagtgagattcagcagctgctgcggggtccccacgggctgccctgagcagacgctgagctccctgacgcccgtcatcatcctgtcccgctatttggataccaccggccagtggggcaaggtcggggtggagcacagggaccaggtgatgaagaatattgtcagcggctacactcggatgctgacccaccggagttcagacggcacctaccacacctccaaggggaacccaggaagcacttggatggctaccaaggcctccgaggaggatgtatccctcacagctcttgtcctaatagccctgaatgagggaaaggagttgtgcagacagaagaatttgatggccagcatcgagagagcccgtggcttcctggagagaaaacttcccgacattcagacaacctttgccgtagccatagcctcctatgcactggcccttgccaacagctcccaagccaacgactgcctggacagctttgccagccctagtgggtgtgggatgcttcttaatcaacctcagtcatggagtggggagggggtgatctcaaatccagcaatgtgttattcatcacttagtgtttcctgagcatccactgtgtatcacctcctgagctcagaccctgtgagaccaagacaaaacccactggccagtggatgagcagaatctgggctccctgtcacaatcactagtgcgaccgc

SEQ ID NO: 160 - DNA, 3778 bp, Homo sapiens
  CDS (74)..(3775)
cgggtcgacgatttcgtccaaccgggacctgctggccagccacagcgcggaggacgaggccgaggacagtgccatgtcgcccatccccgtggggccaccgtcccccttccccaccagcgaggacttcacccccaaggagggctcgccgtacgaggcccctgtctacattcctgaagacattccgatcccagcagacttcgagctccgagagtcctccatcccaggggctggcctgggggtctgggccaagaggaagatggaagccggggagaggctgggcccctgcgtggtggtgccccgggcggcggcaaaggagacagacttcggatgggagcaaatactgacggacgtggaagtgtcgccccaggaaggctgcatcacaaagatctccgaagacctgggcagtgagaagttctgcgtggatgcaaatcaggcgggggctggcagctggctcaagtacatccgtgtggcgtgctcctgcgatgaccagaacctcaccatgtgtcagatcagtgagcaggtaatttactataaagtcattaaggacattgagccaggtgaggagctgctggtgcacgtgaaggaaggcgtctaccccctgggcacagtgccgcccggcctggacgaggagcccacgttccgctgtgacgagtgtgacgaactcttccagtccaagctggacctgcggcgccataagaagtacacgtgtggctcagtgggggctgcgctctacgagggcctggctgaggagctcaagcccgagggccttggcggtggcagcggccaagcccacgagtgcaaggactgcgagcggatgttccccaacaagtacagcctggagcagcacatggtcatccacacggaggagcgcgagtacaaatgcgaccagtgtcccaaggccttcaactggaagtccaacttcatccgccaccagatgtcccacgacagcggcaaacgcttcgaatgtgaaaactgcgtgaaggtgttcacggaccccagcaaccttcagcggcacatccgctcgcagcacgtgggcgctcgggcccacgcctgccccgactgcgggaagaccttcgccacgtcctccggcctcaagcagcacaagcatatccacagcacggtgaagcctttcatatgtgaggtctgccacaagtcctacacgcagttctccaacctgtgccggcacaagcggatgcacgccgactgccgcacgcagatcaagtgcaaggactgtggccagatgttcagcactacctcctccctcaacaagcaccggcgcttctgcgagggcaagaaccattacacgccgggcggcatctttgccccgggcctgcccttgacccccagccccatgatggacaaggcaaaaccctcccccagcctcaatcacgccagcctgggcttcaacgagtactttccctacaggccgcacccggggagcctgcccttctccacggcgcctcccacgttccccgcactcacccccggcttcccgggcatcttccctccatccttgtacccccggccgcctctgctacctcccacatcgctgctcaagagccccctgaaccacacccaggacgccaagctccccagtcccctggggaacccagccctgcccctggtctccgccgtcagcaacagcagccagggcacgacggcagctgcggggcccgaggagaagttcgagagccgcctggaggactcctgtgtggagaagctgaagaccaggagcagcgacatgtcggacggcagtgactttgaggacgtcaacaccaccacggggaccgacctggacacgaccacggggacgggctcggacctggacagcgacgtggacagcgaccctgacaaggacaagggcaagggcaagtccgccgagggccagcccaagtttgggggcggcttggcgcccccgggggccccgaacagcgtggccgaggtgcctgtcttctattcccagcactcattcttcccgccacccgacgagcagctgctgactgcaacgggcgccgccggggactccatcaaggccatcgcatccattgccgagaagtactttggccccggcttcatggggatgcaggagaagaagctgggctcgctcccctaccactcggcgttccccttccagttcctgcccaacttcccccactccctttaccccttcacggaccgagccctcgcccacaacttgctggtcaaggccgagccaaagtcaccccgggacgccctcaaggtgggcggccccagtgccgagtgcccctttgatctcaccaccaagcccaaagacgtgaagcccatcctgcccatgcccaagggcccctcggcccccgcatccggcgaggagcagccgctggacctgagcatcggcagccgggcccgtgccagccaaaacggcggcgggcgggagccccgcaagaaccacgtctatggggaacgcaagctgggcgccggcgaggggctgccccaggtgtgcccggcgcggatgccccagcagcccccgctccactacgccaagccctcgcccttcttcatggaccccatctacagggtagaaaagcggaaggtcacagaccccgtgggagccctgaaggagaagtacctgcggccgtccccgctgctcttccacccccagatgtcagccatagagaccatgacagagaagctggagagctttgcagccatgaaggcggactcgggcagctccctgcagcccctcccccaccaccccttcaacttccggtccccacccccaacgctctccgaccccatcctcaggaagggcaaggagcgatacacgtgcaggtactgtgggaagatcttccccagatcagccaatctcaccagacacctgaggacgcacactggggagcagccgtacaggtgtaagtactgcgaccgctccttcagcatctcttcgaacctccagcggcacgtccggaacatccacaacaaggagaagcctttcaagtgccacctgtgcaaccgctgcttcgggcagcagaccaacctggaccggcacctcaagaagcacgagcacgagaacgcaccagtgagccagcaccccggggtcctcacgaaccacctggggaccagcgcgtcctctcccacctcagagtcggacaaccacgcacttttagacgagaaagaagactcttatttctcggaaatcagaaactttattgccaatagtgagatgaaccaagcatcaacgcgaacagagaaacgggcggacatgcagatcgtggacggcagtgcccagtgtccaggcctagccagtgagaagcaggaggacgtggaggaggaggacgacgatgacctggaggaggacgatgaggacagcctggccgggaagtcgcaggatgacaccgtgtcccccgcacccgagccccaggccgcctacgaggatgaggaggatgaggagccagccgcctccctggccgtgggctttgaccacacccgaaggtgtgctgaggaccacgaaggcggtctgttagctttggagccgatgccgacttttgggaaggggctggacctccgcagagcagctgaggaagcatttgaagttaaagatgtgcttaattccaccttagattctgaggctttaaaacatacactgtgcaggcaggctaagaaccaggcatatgcaatgatgctgtccctttccgaagacactcctctccacaccccctcccagggttctctggacgcttggttgaaggtcactggagccacgtcggagtctggagcatttcaccccatcaaccacctctga

SEQ ID NO: 161 - DNA, 4417 bp, Homo sapiens
  CDS (168)..(2240)
gtgtcagccctagtcattcaggagattattgcagaagtttccaaactgaagcaagctgtgcccaggtccctgtaacagcaggtggctttctgacatcagcagagactggtgctttttcccaggtacaaaggacctccagaccagagccagccagcagcaaaaagagcatggagctgaggagtacagcagcccccagagctgagggctacagcaacgtgggcttccagaatgaagaaaactttcttgagaacgagaacacatcaggaaacaactcaataagaagcagagctgtgcaaagcagggagcacacaaacaccaaacaggatgaagaacaggtcacagttgagcaggattctccaagaaacagagaacacatggaggatgatgatgaggagatgcaacaaaaagggtgtttggaaaggaggtatgacacagtatgtggtttctgtaggaaacacaaaacaactcttcggcacatcatctggggcattttattagcaggttatctggttatggtgatttcggcctgtgtgctgaactttcacagagcccttcctctttttgtgatcaccgtggctgccatcttctttgttgtctgggatcacctgatggccaaatacgaacatcgaattgatgagatgctgtctcctggcagaaggcttctaaacagccattggttctggctgaagtgggtgatctggagctccctggtcctagcagttattttctggttggcctttgacactgccaaattgggtcaacagcagctggtgtccttcggtgggctcataatgtacattgtcctgttatttctattttccaagtacccaaccagagtttactggagacctgtcttatggggaatcgggctacagtttcttcttgggctcttgattctaaggactgaccctggatttatagcttttgattggttgggcagacaagttcagacttttctggagtacacagatgctggtgcttcatttgtctttggtgagaaatacaaagaccacttctttgcatttaaggtcctgccgatcgtggttttcttcagcactgtgatgtccatgctgtactacctgggactgatgcagtggattattagaaaggttggatggatcatgctagttactacgggatcatctcctattgaatctgtagttgcttctggcaatatatttgttggacaaacggagtctccactgctggtccgaccatatttaccttacatcaccaagtctgaactccacgccatcatgaccgccgggttctctaccattgctggaagcgtgctaggtgcatacatttcttttggggttccatcctcccacttgttaacagcgtcagttatgtcagcacctgcgtcattggctgctgctaaactcttttggcctgagacagaaaaacctaaaataaccctcaagaatgccatgaaaatggaaagtggtgattcagggaatcttctagaagctgcaacacagggagcatcctcctccatctccctggtggccaacatcgctgtgaatctgattgccttcctggccctgctgtcttttatgaattcagccctgtcctggtttggaaacatgtttgactacccacagctgagttttgagctaatctgctcctacatcttcatgcccttttccttcatgatgggagtggaatggcaggacagctttatggttgccagactcataggttataagaccttcttcaatgaatttgtggcttatgagcacctctcaaaatggatccacttgaggaaagaaggtggacccaaatttgtaaacggtgtgcagcaatatatatcaattcgttctgagataatcgccacttacgctctctgtggttttgccaatatcgggtccctaggaatcgtgatcggcggactcacatccatggctccttccagaaagcgtgatatcgcctcgggggcagtgagagctctgattgcggggaccgtggcctgcttcatgacagcctgcatcgcaggcatactctccagcactcctgtggacatcaactgccatcacgttttagagaatgccttcaactccactttccctggaaacacaaccaaggtgatagcttgttgccaaagtctgttgagcagcactgttgccaagggtcctggtgaagtcatcccaggaggaaaccacagtctgtattctttgaagggctgctgcacattgttgaatccatcgacctttaactgcaatgggatctctaatacattttgaggtcagccacttctccagtggaactctgaagtacagatgctgaattttctgctttggaaagaaaaaaaaaagaagctattgtccacagattgatgcttccataatggaatcagctttaattgcaaggaatgaagaaaaacaagagtggaccttcaaagctacaacattttcctcctcccctccctccccaccagccccttccccaccaagaactgctatgatgtcccaaagtgaggtgttgttgattccagtctcaatgggattttctgactttaatgtttgcaaggcatttcaccagaatacagctataaacggccgctcccaacaactgggctctgactcacccacacccacttagtgtccactaagtagtccagggtgactcagtttaagcacatctcaggtgaggtcactctgcatataccttggcttacctgaaatagcctgaacttgaatctcacataagggaaaactagtcatcaatcaccaactcattgactaccctcaggaagtcctgcagaaatcaagagtccttgaggagaacacgtggatcataccaaaaccagggtttaaatccattctgcttaagagttctatcagtcagtttaaccataaattacgctacagaaacaaacaacccaaaaacctcagtggcttacagatttatttttcactcacatgtttgtaatgatccatcttggttgtaatccatattgcttcagcacccagtctaaaggagcagcctctaaggggggcatgttggtcttaagagggaaaagaaaggtgggaaccacatgatggctctttcatcttccgctaggaaatgataccctttacttccatgacattccattagccaaaacaagtcctgtgacaggcacgatgtcagtcaccacagttaaattatcctgtcatagggagggatagtgaatattttgcagaagtaatatgatacaccataagggtacataatatccatgtctcccttcaaggagccatcctgttgtaggccataacggtaggcctattcatctgcacatttggtaatgtattcctggtgacaaagcagctactcttcaatcaaaagccgtgtaagaagcagttgaggaaaaaaagtcctggttgagctctgaaaaccttgcgttgataatttcattgaccaggatggcatcagtatcaaacttgaagaatgggtgtcagtgtctaagaaaaagattccagagacaatggtggtgtgctctttaacgaaatgcccatcaccactgctcttaatagcatgaagaccacatgctgtgagaaaacacaaacatcaattaccaagtcaagaaacagacactgaatgtgaaaaaggttttgaaataccttaagtaatttattttgtttctatttttccttctgtttgtgtacaagagtaatttaaaagaaaaagctatgtgaaaatagttggggttttttgtgtgttttgttttttgtggtggtgaaggaggaggcctaatgtccagaggactgtttatccctgaagtatgatatactaaaatatttcttattatttgtatcaattttccttggagctcaatgtgcccttgcagtcttcagactttattttaggaaaatatatttgcatgttttccccccattctcaatgtttggtgtcctggttcatcataccccacagaatgttatgtttatgtatcataccattcctctgtggacatgcatttactttgtttacaggttttggtttgggggttctctttttcctactctggacagtgcatgtacatttactttgcatgctggtgcttttttttctatagcaatagtgtctgatagacatatgcaagtcacatgtaatttaagatctagtagccacgctaaaaaacaagtaaaattaattttaatatatttaactcaatacattggagatattatttcagtaagatatttttcattcttatgaaactaagtctgtctggtttgcatatctcagttgagacactaaagttttactgataatacttaatccatgtttagatttcataaaatctaaatttgcaaagtaaatttacatacccatgttggtctaaatgtgcttaaaagttttccaataactgaaatgagtatcagttttaaatttaaaaatttgttacttggttactccatatttcaggtat

SEQ ID NO: 162 - DNA, 556 bp, Homo sapiens
  CDS (37)..(450)
cagtggtaacaacgcagagtacgcggggtcggtaccatggcgacgcgcggtggggctggggtggcaatggcggtttggtccctcttatccgcccgggccgtgaccgcgttccttctgttgttcctccctcgcttcttacaggcccagaccttctctttccctttccagcagccggagaagtgcgacaacaaccagtactttgatatctccgccctctcgtgtgttccttgtggagctaaccagaggcaagatgcccgaggaacttcatgtgtatgtctaccaggatttcagatgatctctaataatggaggacctgctattatttgtaaaaagtgcccagaaaacatgaaaggtgttacagaagatggctggaactgcatttcttgccctagtgacttaactgccgaaggaaaatgtcactgtcccattggccatattttaggtaagaattagattccttataaagaagtagtgataaatcttcattcttgtttttgtttttatttgaaaagggcactaatttaaatagttaagtgattacttaatatttttgcag

SEQ ID NO: 163 - DNA, 6131 bp, Homo sapiens
  CDS (316)..(2058)
gtccacccccgacgctctgaggtcaccgactgggccggcccgcggggggcggagggacggagggaagatggcggcaggggccggatattggcgccgcctcccccaatcccggagccggcgcagatgaggcagttcggctggggccagcggcgctttggaacccgaggtggggggaccctggcggtggggcctggtcctgctatatgccggcgcctcggctagagtgagcggcggcgacgcctctttcctccatctctttccctgtcgctgcgagagcgagcgggcggcggaggcggcggcggcggcggggccgggatggaggacgttaactccaacgtgaacgcggaccaggaggtgcggaagctgcaggagctggtgaagaagctggagaagcagaacgaacagctgaggagccgctcgggggccgtgcagggcgccggctcccttgggcccggcagcccggttcgggccggcgcgtccattccctcctccggcgcggcgtctcctcggggcttccccttgggcctcagcgccaagtcgggcggcgggcccgggtcgggcccgaggcggacgagtagcgaagagctgcgggacgccacctccttgctagcggcgggcgagggcggcttgctggacgaggtggagccgctgcggcccgacgagctggagcgcctgtcaggctgggaggaggaggaggagagctggctgtattcatcaccaaagaaaaaacttacaccaatgcagaaatcggttagtccattagtttggtgcaggcaagttttggattacccaagtcctgatgttgagtgtgctaaaaaatctcttatccacaaacttgatcaaactatgtcagctctcaagaggcagaatttatataataatcctttcaactctatgagttacaccagtccttacagtccaaatgccagtagcccatacagcagtggcttcaattctccatcctcaaccccagtgcgacctcctatagtcaaacagcttatacttcctggaaattcaggtaacttgaaaagctcagacagaaatcctccactcagtcctcagtcctctatagatagtgagttaagtgcttcagaattagatgaagattcaattggatccaattataagctaaatgatgtaactgatgtacagattctagcccggatgcaggaagaaagtctccggcaagaatatgcagccaccacgtctcggcgcagttctggttcatcttgcaattctacaagacggggtacttttagtgatcaggaacttgatgcacaaagtttagatgatgaagatgacaatatgcatcatgcagtataccctgctgttaacaggttttcaccatcaccacgcaattcacctcgaccgtcacctaagcagtcacccagaaattcacctcgttcacgatctcctgctcggggaatagaatatagtagagtgtccccacagcctatgattagccgcttacagcaacctcgcctttcacttcaaggccatcccacagatttacagacaagcaatgttaaaaatgaagaaaaactaagacgcagtcttccaaacctgtcccgaacatctaatacacaagttgactcagtgaaaagcagcagaagtgactcaaattttcaagtgccaaacggaggaatacctcgtatgcaacctcaggcttcagccataccttctccaggcaaattccgttcccctgcagcaccatctcctttggctcttcggcaaccagtgaaagcatttagtaaccatggctctggttctcctggtagccaagaaataacacagctcacacaaaccacctcctcacctgggcctcctatggttcagagcacagtctcagcaaatcctcccagcaatatcaacagcgctactctaaccagacctgcagggacaactgcaatgagaagtggcttgcccagacccagtgccccttctgctgggggcataccagtgcctcgcagcaaacttgcacagcctgttcgcagatccttgccagctcctaaaacctatggtagcatgaaagatgacagttggaaagatggctgttactgaccagcaaagacaagaatgcagaagtccacggcttcatggatacccttcaccaggctaaaaaacaacttttatatgcagactgttcagataagactcttgggatttataaaatcccagccctctctgtcttaattagcacaaaccgacagagatcatcaaacagcactttaatgacatttaacatcagatgtgtttggtaatcatacaatcactctccatagaatcacttttagttttgtttaatagaaactaggttgatttttaaaaaatatttgacagaggccaatatctgggcaaatacctaatggatgccaaagagaaatgcccatttgtaaatgagaaaaatgcccatttgtgcacaagaaaatggtgaattcaggctatccaaaacttcacattcaacctaatttactgtataaatagtatcaataaatatttgtgttaatgagaactaatattctgactaattatctaaagtgtttcactagtacaccaggaaactacagattgagattagggggtgggaggaaagaaacctgggctagagattaaaacattcctaaatttagcagaatttcagaaatgatttttgcagattcattagaaaagaaaaattgtcatttaatcttaagttttggatgtagctcacatgtcaccaccaccagatagtgttacagcatgtatccatcatgttgcattgacacatcaaacttgtgtgtgtttgttttgattgccaaaagggcttaatatcagttgtacaatctttctgaactttatagttcctggctcaggaaagatggcctttgctattgaagccaacttcttcacatgctgttatctttacagaactaagagatcttgtttctattagcaggttttcatgataggaaagaacaagtagtgtgtgtctttattcttgatacaacaccacctcggtgcttgcaacctggaacaaaaccataccatgagagagagggggaaaaaaatctatgcacttaacctacaaaatctctggtgatgacagttgtattgttgctattacatggcataacggtctattatgtggtaggaaaatatagcctgctaaatcctacttaagttgatccactttaaactgagtaactgtataaaacatctattgaaaattcttttccttttgacttagattctgccttacatcaatttttgcatttttggtaaaaaaaaaaccctactacgtatgactctaacctgatacttgctctctaatggctcttaatatatccttgaaatcggctatttcaattttatcagacttttaccagagtaaaacttgcttctgtagcaggcctctcattttttattatgaggtctgtttttaaatacttaatttgaacagctctaagatattgtcacttaggtcatctaaaagcttttagagatttgaacataagttcatttcctgttaatcaaagacattccgtaagttggcaaaagaaattgggagagagaaatagaaggcttgatattctggacagcattaaggttgataggttgatgataaaaacttaaaaccaggacctccattctgtcatgactgacaccatggtagtctgtcagcttgaccagtggagagtcattcatttagcacaagcagctggagatttaaactgccagtactatgtatttggtgtataatgcaaggaagaaactttatccttgaatttgagggtgatggggtgggtcaggaaaggatggcgccagaattctacatgataatgaactaaaaaatgttgcttttcagaggaagataaagcatcttcttttgggaggggggtatctcatgtctaagtaagtaaaagaaagaagtagctactgtctcttttaaaaaccacgtacaaaacagaacaagtctcagttttcagtgcaacatttcaaaaaatatatatgctgcaatctaataattaaaaggaattttacctattatgaaacatattacattttttaagttagataatcagtttcaaaaggagtattcaggttatttaactttgtttttaaatggctgcatcagaaaaaaatgtctatttttttttattaaaatatttcatcacttgttaaaacatatttttgatctgagtttggtaaagtattattttacctgctgttgtactaccacagactgttgacttttagtttcttaaagagaaaaattgcctttttactagaaagcctttgtatattgcaatttttctgtttgggaaaatctaaggatttactgtggttagtcttacagaagaaatgtggatttgataaactagtgcctatgattttaacttatgtttgatatatagtagtaagggttttatgaatgttgattattttgtgccaacagcccagaattgtcacttatatgtaagcagaaaacaatgagctctgcttccaaagttatttaattttctcagtgtttgaatgttattttttgtaagtgtgttaataaaagtgtaaagaattggaaaaaatataaatattcttaactcaagcatttgctggatcatttttctacaaaacttgtttgtacaatataaaacactctctgaagagttgactttttttcagtttcgtatcctggaaatcacattttgtaaaactggggaccattcataattgtcagatactttttaaaattatctcaatacatcacttttataaaaaaaaaaagtttttttgaaagaaaattagatacatatgtggccccagatgtttgtataactctagaatgatctagactatgtatgtttaaattaactttttattgaatgtacaggtgtccatttttgacgttaagcatggtcctttaaggtcacatgacgtttgatttgcaaacatttctatagccgaacttgtatatgtggttgcctccttaataaacagcctgaccataatgtttattattaaatttatattctttaagtgtttaattaatctctggatatggtaagattcctttttttcctctcagttgcctacacttggttttaataaattactcagttgagtttttctttaaccacagaaacccaaatcatattgccctttcagatttagtcttcatggggttggattatgtcttatattttctctgtcagagttatttcatatatggattttacttgaaggaaatttatagtttactctaaattgatttgttcttggaacttttttacctgctgtgaattgatacctagttataaaaagctagcatttgcctagatcataactatgtatggtatctagttagaaaaaaacaagcaaaaagctattatgagtttccaagagggacaattaatgcattttcataccaaatgcgaatatttaggtgatcacgtgcatcttttcttgtatggatggaaaaatcaagaattgtacactgtttaatgagttctccatattcctttaggagatatttgctttgcaattacatgttacaattagaataattacaattaaaataatattacatgttacaattagattaatagtgatgagagggaaaaaagacacccttctgtttttttctctcaagccagtctaaaaacttgaagagccatttaaaattaaatgtcactatacttgtattataaatcaatacataagtttaaacctgttatatactcagtgcaacagaaaaacccatatggaggttcaaccactgatgtattttgaatgatcctaaatataagtcttgggtggctaaatggccctctgcttaccagtctgaaaatgaaaccgattatactcatcggccttatttactgtaatacaaactggttaaaactatgttaactgaatgctagtttgaaacaaattatctacattaagtcatcttaatgttttctctttaaaagaaataaaaaaatctgtttcttctgatttcgaaagtaatagaaactctgctgtagaacataaactaaaaatattaaaaagtataaaggtaaaaaatgatagttgtctgcaatcccataatccggaaatattgaagtactgtccgtaacatggttatgacatgttaagtggaagggtagaaggtc

SEQ ID NO: 164 - DNA, 700 bp, Homo sapiens
  CDS (125)..(505)
gcacgagcagaggcggacgcccagcgctgcagagagaaagtgacgagccgcccttcgttgtcagccaggaacgcggacacagcggcgctcccaccctgctgctgtcgatccctaggccgccgcgatggcagctgccggcgcccgaggcctgcggtccacctaccaccgactcatggataaagtggagttgttgctgccaaagaaattgaggccgctttacaaccacccggcaggccccagaacagtttttttctgggctccaataatgaaatggggattggtgtgtgctggactagcggacatggccagacctgcagagaaactcagcacagctcagtccactgtgttgatggctacagggtttatttggtcaagatattcacttgtaattataccaaaaaattggagtttgttcgctgttaatttctttgtggggtcagcaggagcctctcagctgtttcggatttggagatataaccaagaactcaaatctaaagggatccagtaagagagttcctgatcacctgaacattctagatgtggacagaaacattggaacctagtgtatttgcttaccgataaggtgatgctaaattctgataacattcgaaaagaaggaaagcaaaatctaactgtacttaaaagctagcacttgacttcacaaaaaataaagcaaacttttagtaccaaaaaaaaaaaa

SEQ ID NO: 165 - DNA, 2746 bp, Homo sapiens
  CDS (787)..(2043)
atggagggccttgtcagccacagtaaggaatgtggacctggtcctcagggtgaaaatgattgctgttatatgacacactggttaacaaaggagggggctgtttgcaaacagaaacaaccaacccagggcctccagccatccaaagattctgcacagccagccacccctaaggctaagaaatcccagactctcctgagactccaagcagagaagctgttgtcatcagcaaagaattctgaccatgaatactgcagagagaaaaatctcttgaaggcagttactgactttccatcaaatagtgctttaggtcaggccaatggtcacagacctaggacagacccacaaccttctgactttcccatgaagttcaatggggagagccaaagtccaggtgagagtggcacgattgtggtcaccttgaacaaccataagagaaagggcttttgttacggctgctgccaagggccggagcaccacaggaatgggggacccttgattccaaaaaagttccaacttaaccaacatagaaggataaaattatctcctcttatgatgtatgagaaattatccatgattagatttcggtacaggattctcagatcccagcacttcagaaccaaaagcaaggtttgcaagctaagaaaagcccagcgaagctgggtacagaaagtcactggggaccatcaagagacccgtagggagaacggtgagggtggcagttgcagcccatttccttccccagaacctaaagacccttcttgtcggcatcagccgtactttccagatatggacagcagtgctgtggtgaaggggacgaactctcatgtgcctgattgccacactaaaggaagctctttcttgggcaaggagcttagtttagacgaagcattccctgaccaacagaatggcagtgccacaaacgcctgggaccagtcatcctgttcttctcctaagtgggagtgtacagagctgattcatgacatccccttaccagaacatcgttctaataccatgttcatttcagaaactgaaagagaaattatgactctgggtcaggaaaatcagacaagttctgtcagtgatgacagagtaaaactgtcagtgtctggagcagatacatctgtgagtagcgtagatgggcctgtgtcccaaaaggctgttcaaaatgagaactcataccagatggaggaggatggatctctcaagcagagcattcttagttctgagttgctggaccacccttactgtaaaagtccactggaggctcccttggtgtgcagtggactcaaactagaaaatcaagtaggaggtggaaagaacagtcagaaagcctctccagtggatgatgaacagctgtcagtctgtctttctggattcctagatgaggttatgaagaagtatggcagtttggttccactcagtgaaaaagaagtccttggaagattaaaagatgtctttaatgaagacttttctaatagaaaaccatttatcaatagggaaataacaaactatcgggccagacatcaaaaatgtaacttccgtatcttctataataaacacatgctggatatggacgacctggcgactctggatggtcagaactggctgaatgaccaggtcattaatatgtatggtgagctgataatggatgcagtcccagacaaagttcacttcttcaacagcttttttcatagacagctggtaaccaaaggatataatggagtaaaaagatggactaaaaaggtggatttgtttaaaaagagtcttctgttgattcctattcacctggaagtccactggtctctcattactgtgacactctctaatcgaattatttcattttatgattcccaaggcattcattttaagttttgtgtagagtgtattccacaacagaaaaacgacagtgactgtggagtctttgtgctccagtactgcaagtgcctcgccttagagcagcctttccagttttcacaagaagacatgccccgagtgcggaagaggatttacaaggagctatgtggctggagagaagagggaaggtaatagagacaacttagtcccatgggagcgcagcaaccgtgtcaggttctttctcctgtcccattagtgacctcagtaacatgcagggtacgtctggcttctgcatggccagtgctgacactagcacagctgttcttctccttctgttgaacctcatcttctgaagaaaggccaagtggcccttgtccatacacttagctgcattaggatgaatatcacgcgtctcacatctttaatccagcctttcgtgacatgttggaaagatacatgtgaaacctacccagttaccctttctgaattgggaggaaaaccaaccaatgtatgtatgagaaactcagaagtctgaatagaaaaacaaagtaaatggcagaagattctcgagtttatgcccgcgtaggtttggagtgttgaaaaagctaaaatgtttagtttcacttggccctgaggtatggttgagaaggctgactgccagcagttgaggattgagtccgaccatgtttacatgcagggttcccaacaccagtggtgacactgggaagcagccccagcactttcctctcctgagtcctccagacccaaaatccttaatgtcaaaccaggtcagtgtttcttactgtgtttcaagtcgttaaaaagactgagagtagaggcactttatgctgctataggtggggttctgtcagcgttaggaaaaaaaaaaaaa

SEQ ID NO: 166 - DNA, 1219 bp, Homo sapiens
  CDS (417)..(1109)
acgtcgggtctccgcggcccgggttattgtacgaaccatccggacccgcgtaatcgtaggaactatcggccccgcgtaatcgtatggtctgcgcgggtcccggcctcccatcagagctgggactccccgcccccaattggcggccgaagagtctcctcgccccagagtcatcttcgggacgcccagggcccgggtgattttgggctcgccgcggccccgggtgattgtttcatctccgtggcccgcggtggtcgtagcgtctccgagaccgcggactcccgtagggtccccgtggccccgagttgtagtcgggacaccccggccgcgggtgatcgtcgggtctccacgcgcccgggtcgctgacgcggatccggcctcggcgccttctcagggcgccctgcaaggccgcaggcaggatgaacattctggcacccgtgcggagggatcgcgtcctggcggagctgccccagtgcctgaggaaggaggccgctttgcacgggcacaaagacttccacccccgcgtcacctgcgcctgccaggagcaccggacaggcaccgtgggatttaagatctccaaggtcattgtggtgggggacctgtcggtggggaagacttgcctcattaataggttctgcaaagacacctttgataagaattacaaggccaccattggagtggacttcgagatggaacgatttgaggtgctgggcattcccttcagtttgcagctttgggataccgctgggcaggagaggttcaaatgcattgcatcaacctactatagaggagctcaagccatcatcattgtcttcaacctgaatgatgtggcatctctggaacataccaagcagtggctggccgatgccctgaaggagaatgacccttccagtgtgcttctcttccttgtaggttccaagaaggatctgagtacccctgctcagtatgcgctgatggagaaagacgccctccaggtgggccaggagatgaaggctgagtactgggcagtctcatctctcactggtgaaatggtccgagaatctctccgggggggccggcttgggcatggtggctgcttggaaacgggccacctgggattgggccctcaagggtgaggccttttttggggaaccttgtccggggggggaataccgcggggggccctccacagcgcgtgtttacacctgggcgggggttcccgcgacacccgggtgtggtgtac

SEQ ID NO: 167 - DNA, 1643 bp, Homo sapiens
  CDS (1)..(1260)
atgtggtggagagatttgacgagactgagactctggttgaagagagaggcaatcccaggagaggggcggaaagcggcaaaggttaatgcgggagtcggagagaagggcatctacacagcaagcagcaggggcggcccgccatctgcgcgctcgaaggcggtcacggtggtcgcggaaggggcggcgtccagatcctggctttccatggatgcgcccgagctgggcccggggctggtggagcgtctggagcagctggcgacgtgtcctctgtgcgggggctccttcgaggacccggtgcttctggcgtgcgagcacagcttctgccgcgcgtgtctggcccgccgctgggggactccgccggcgaccggcaccgaggcttcccccaccgcctgtccctgctgcggcctgccgtgtccccgccgcagcctgaggtctaatgtgcggctggcggtggaggtgcgaatcagccgcgagctgcgagagaagctggctgagcctggggcccgtgcggggagacgccgaggggggcgcatccccaccatgggctgcctggacctgcccggagaggatatgaggaagacatggagacgatttgaagtcccaacatccaagtcatctaattcagaggatgatctccctgaagattatccagtggtcaaaaaaatgcttcatagactgacagccgacctgaccctggaccctgggaccgcacaccgccgcctgctcatctccgccgaccgccgcagcgtacaactggccccaccagggacgcccgcgccccctgacggccccaagcgcttcgatcagctcccagctgtgctgggtgcgcagggcttcggggccggccgccactgctgggaggtggagactgcggacgccgcctcctgcagagactcttctggggaggatgcggacgacgaggagagccactatgcagtgggcgcggccggggaatcagtgcaacgcaagggctgcgtaaggctgtgccctgcgggggccgtgtgggccgtggagggccgcggcggccgcctgtgggccctcacggcacccgaacccaccctgctgggcggtgttgagcccccgccgcggcgcattcgcgtggacctggactgggagcggggccgcgtggccttctacgacggccgctcactcgacctgctttacgccttccaggcgcctggccccctgggggagcgcatcttcccgctgttctgcacctgcgaccctcgtgctccgctccgcattgtaccagcggaaagctgagtctcgtctccaactagaagtttggcccggccactggccctgcagctgctttttgggggtggaattccccactcatttctgggaacacattcacacgcccattgcaggagtattaatagcaacccacattttcgccccaaaataatgagacctcacctggtctccacgtttccacgtccctgctcaaaaccaaatccattcctgccttctggctctcagaatcttctctcccctacagctactacagtacttcctgacttctcccattcaaaccattctaggcctgcaatggggaacaggccctccccatcagtattggtaaagtgaccatgattcctacatagagctctgctggtcaaatacttgactcccacttcagc

SEQ ID NO: 168 - DNA, 2170 bp, Homo sapiens
  CDS (194)..(1165)
cgatgatgccagttccctgctgctgcagagcctcctgctgtccctctctgagctgaagacatttcggctgacctccagctgtgtgagcaccgagggcctcgcccacctggcatctggtctgggccactgccaccacttggaggagctggacttgtctaacaatcaatttgatgaggagggcaccaaggcgctgatgagggcccttgaggggaaatggatgctaaagaggctggacctcagtcaccttctgctgaacagctccaccttggccttgcttactcacagactaagccagatgacctgcctgcagagcctcagactgaacaggaacagtatcggtgatgtcggttgctgccacctttctgaggctctcagggctgccaccagcctagaggagctggacttgagccacaaccagattggagacgctggtgtccagcacttagctaccatcctgcctgggctgccagagctcaggaagatagacctctcagggaatagcatcagctcagccgggggagtgcagttggcagagtctctcgttctttgcaggcgcctggaggagttgatgcttggctgcaatgccctgggggatcccacagccctggggctggctcaggagctgccccagcacctgagggtcctacacctaccattcagccatctgggcccaggtggggccctgagcctggcccaggccctggatggatccccccatttggaagagatcagcttggcggaaaacaacctggctggaggggtcctgcgtttctgtatggagctcccgctgctcagacagatagacctggtttcctgtaagattgacaaccagactgccaagctcctcacctccagcttcacgagctgccctgccctggaagtaatcttgctgtcctggaatctcctcggggatgaggcagctgccgagctggcccaggtgctgccgcagatgggccggctgaagagagtggacctggagaagaatcagatcacagctttgggggcctggctcctggctgaaggactggcccaggggtctagcatccaagtcatccgcctctggaataaccccattccctgcgacatggcccagcacctgaagagccaggagcccaggctggactttgccttctttgacaaccagccccaggccccttggggtacttgatggccccctcaagacctttggaatccagccaagtgatgcacccaaatgatccacctttcgcccactgggataaatgactcaggaaagaagagcctcggcagggcgctctgcactccacccaggaggaaggatacgtgtgtcctgctgcagtcctcagggagaacttttttgggaaccaggagctgggtctggacaaaggagtaccctgcattacgtgggatatgtgtgatcaattggggacatgcgacacacaatgagggtgtcacgacaatgcatgacacgtacggttatatgtggcagtgtgaccccttgacatgtggcgttacatgaaagtcagtgtggcacgtgttctgtggcatgggtgctggcatcccaagtagcaggatacatgattgttggtctatatatgacacatgacaaatgtccatgtcacaggactcatggctggccagatgacctcaggctggcccaagatctaatttattaatttttaaagcaaatacatatttatagattgtgtgtatggagcagctaagtcaggaaaagtcttccgcccgagctgggaggggagagtgtccatgcactgaccagtccaggggctcaagggccagggctctggaacaagccagggactcagccattaagtcccctcctgcctcaatcctcagcctacccatctataaacttgatgactcctcccttacttacatactagcttccaaggacaggtggaggtagggccagcctggcgggagtggagaagcccagtctgtcctatgtaagggacaaagccaggtctaatggtactgggtagggggcactgccaagacaataagctaggctactgggtccagctactactttggtgggattcaggtgagtctccatgcacttcacatgttacccagtgttcttgttacttccaaggagaaccaagaatggctctgtcacactcgaagccaggtttgatcaataaacacaatggtattccaaaaaaaaaaa

SEQ ID NO: 169 - DNA, 3543 bp, Homo sapiens
  CDS (313)..(3540)
gtgcgcgatcgctccggaattcccgggtcgagctgcctgggactcaactcgcagtcccacctgcccggttagggtctgcaggatggagagcgtgttcaaggtggtcgttttgcccacttctcatggcaaccctctaggggaggcaccattagtgtgcccatttcacagggcttcctcagccgccgcctcaagggctccatcaagcgcaccaagagccagcccaagctggaccgcaaccacagcttccgccacatcctgccggggttccggagcgccgccgccgccgccgcggacaatgagaggtcccatctgatgccgaggctgaaggagtctcgctcccacgagtccctgctcagccccagcagtgcggtggaggcgctggacctcagcatggaggaagaggtggtcatcaagcccgtgcacagcagcatccttggccaggactactgcttcgaggtgacgacgtcatcaggaagcaagtgcttttcctgccggtctgcagctgagcgggataagtggatggagaacctccggcgagcggtgcatcccaacaaggacaacagccggcgtgtggagcacatcctgaagctgtgggtgatcgaggccaaggacctgccagccaagaagaagtacctgtgcgagctgtgcctggacgatgtgctctatgcccgcaccacgggcaagctcaagacggacaatgttttctggggcgagcacttcgagttccacaacttgccgcctctgcgcacggtcactgtccacctgtaccgggagaccgacaagaagaagaagaaggagcgcaacagttacctgggcctggtgagcctacctgctgcctcggtggccgggcggcagttcgtggagaagtggtacccggtggtgacgcccaaccccaagggcggcaagggccctggacccatgatccgcatcaaggcgcgctaccaaaccatcaccatcctgcccatggagatgtacaaagagttcgctgagcacatcaccaaccactacctggggctgtgtgcagccctcgagcccatcctcagtgccaagaccaaggaggagatggcatctgccctggtgcacatcctgcagagcacgggcaaggtgaaggacttcctgacagacctgatgatgtcagaggtggaccgctgcggggacaacgagcacctcatcttccgggagaacacactggccaccaaggccattgaggagtacctcaagctagtgggccagaagtacctgcaggacgccctaggtgagttcatcaaagcgctgtatgagtcagatgagaactgcgaagtggatcccagcaagtgctcggccgctgacctcccagagcaccagggcaacctcaagatgtgctgcgagctggccttctgcaagatcatcaactcctactgtgtcttcccacgggagttgaaagaggtgtttgcctcgtggaggcaggagtgcagcagtcgcggccgcccggacatcagtgagcggctcatcagcgcctccctcttcctgcgcttcctctgcccagccatcatgtcgccctcactcttcaacctgctgcaggagtaccctgatgaccgcactgcccgcaccctcaccctcatcgccaaggtcacccagaacctggccaactttgccaaatttggcagcaaggaggaatacatgtccttcatgaaccagttcctagagcatgagtggaccaacatgcagcgcttcctgctggagatctccaaccccgagaccctctccaatacagccggcttcgagggctacatcgacctgggccgcgagctctccagcctgcactcactgctctgggaggccgtcagccagctggagcagagcatagtatccaaactgggacccctgcctcggatcctgagggacgtccacacagcactgagcaccccaggtagcgggcagctcccagggaccaatgacctggcctccacaccgggctctggcagcagcagcatctcagctgggctgcagaagatggtgattgagaacgatctttccggtctgatagatttcacccggttaccgtctccaacccccgaaaacaaggacttgttttttgtcacaaggtcctccggggtccagccctcacctgcccgcagctcgagttactcggaagccaacgagcctgatcttcagatggccaacggtggcaagagcctctccatggtggacctccaggacgcccgcacgctggatggggaggcaggctccccggcgggccccgacgtcctccccacagatgggcaggccgctgcagctcagctggtggccgggtggccggcccgggcaaccccagtgaacctggcagggctggccacggtgcggcgggcaggccagacaccaaccacaccaggcacctccgagggcgcgccaggccggccccagctgttggcaccgctctccttccagaaccctgtgtaccagatggcggctggcctgccgctgtcaccccgtggccttggcgactcaggctctgagggccacagctccctgagctcacacagcaacagcgaggagttggcggctgctgccaagctgggaagtttcagcactgccgcggaggagctggctcggcggcccggtgagctggcacggcgacagatgtcactgactgaaaaaggcgggcagcccacggtgccacggcagaacagtgctggcccccagaggaggatcgaccagcctccgcccccacccccgccgccacctcctgccccccgcggccggacgccccccaacctgctgagcaccctgcagtacccaagaccctcaagcggaaccctggcgtcggcctcacctgattgggtgggccccagtacccgcctgaggcagcagtcctcttcctccaagggggacagcccagaactgaagccacgggcagtgcacaagcagggcccttcacctgtgagccccaatgccctggaccgcacagccgcttggctcttgaccatgaacgcgcagttgttagaagacgagggcctgggcccagaccccccccacagggataggctaaggagtaaggacgagctcagccaagcagaaaaggacctggcggtgctgcaggacaagctgcgaatctccaccaagaagctggaggagtatgagaccctgttcaagtgccaggaggagacgacgcagaagctggtgctggagtaccaggcacggctggaggagggcgaggagcggctgcggcggcagcaggaggacaaggacatccagatgaagggcatcatcagcagggccagtctgactgtctctgtctctggctataggttgatgtccgtggaggaagaactgaagaaggaccacgcagagatgcaagcggctgtggactccaaacagaagatcattgatgcccaggagaagcgcattgcctcgttggatgccgccaatgcccgcctcatgagtgccctgacccagctgaaagagaggtacagcatgcaagcccgtaacggcatctcccccaccaaccccaccaaattgcagattactgagaacggcgagttcagaaacagcagcaattgttaa

SEQ ID NO: 170 - DNA, 1791 bp, Homo sapiens
  CDS (227)..(1468)
gggtgagtgcaccgcgttctcgcacgcgtcatggcggtcctcggagtacagctggtggtgaccctgctcactgccaccctcatgcacaggctggcgccacactgctccttcgcgcgctggctgctctgtaacggcagtttgttccgatacaagcacccgtctgaggaggagcttcgggccctggcggggaagccgaggcccagaggcaggaaagagcggtgggccaatggccttagtgaggagaagccactgtctgtgccccgagatgccccgttccagctggagacctgccccctcacgaccgtggatgccctggtcctgcgcttcttcctggagtaccaggtggtttgtggactttgctgtgtactcgggcggcgtgtacctcttcacagaggcctactactacatgctgggaccagccaaggagactaacattgctgtgttctggtgcctgctcacggtgaccttctccatcaagatgttcctgacagtgacacggctgtacttcagcgccgaggaggggggtgagcgctctgtctgcctcacctttgccttcctcttcctgctgctggccatgctggtgcaagtggtgcgggaggagaccctcgagctgggcctggagcctggtctggccagcatgacccagaacttagagccacttctgaagaagcagggctgggactgggcgcttcctgtggccaagctggctatccgcgtgggactggcagtggtgggctctgtgctgggtgccttcctcaccttcccaggcctgcggctggcccagacccaccgggacgcactgaccatgtcggaggacagacccatgctgcagttcctcctgcacaccagcttcctgtctcccctgttcatcctgtggctctggacaaagcccattgcacgggacttcctgcaccagccgccgtttggggagacgcgtttctccctgctgtccgattctgccttcgactctgggcgcctctggttgctggtggtgctgtgcctgctgcggctggcggtgacccggccccacctgcaggcctacctgtgcctggccaaggcccgggtggagcagctgcgaagggaggctggccgcatcgaagcccgtgaaatccagcagagggtggtccgagtctactgctatgtgaccgtggtgagcttgcagtacctgacgccgctcatcctcaccctcaactgcacacttctgctcaagacgctgggaggctattcctggggcctgggcccagctcctctactatcccccgacccatcctcagccagcgctgcccccatcggctctggggaggacgaagtccagcagactgcagcgcggattgccggggccctgggtggcctgcttactcccctcttcctccgtggcgtcctggcctacctcatctggtggacggctgcctgccagctgctcgccagccttttcggcctctacttccaccagcacttggcaggctcctagctgcctgcagaccctccaggggccctgaggtctgttcctggggcagcgggacactagcctgccccctctgtttgcgcccccgtgtccccagctgcaaggtggggccggactccccggcgttcccttcaccacagtgcctgacccgcggccccccttggacgccgagtttctgcctcagaactgtctctcctgggcccagcagcatgagggtcccgaggccattgtctccgaagcgtatgtgccaggtttgagtggcgagggtgatgctggctgctcttctgaacaaataaaggagcatgccgatttttaaaaaaaaaaaa

SEQ ID NO: 171 - DNA, 545 bp, Homo sapiens
  CDS (15)..(341)
  misc_feature (1)...(545): n = a,t,c or g
aaggggagcaagctatggaggggaacagggatgaggctgagaaatgtgtcgagatcgcccgggaggccctgaacgccggcaaccgcgagaaggcccagcgcttcctgcagaaggccgagaagctctacccactgccctcggcccgcgcactattggaaataattatgaaaaatggaagcacggctggaaatagccctcattgccgaaaaccatcaggtagtggcgatcaaagcaagcctaattgcacaaaggacagcacatctggtagtggtgaaggtggaaaaggctataccaaagaccaagtagatggagttctcagagctttatggatattggaacattgatatgggatggtggacctgtacctaacacacacataaacaaatgtaaaaattactatgaagtacttggagttacgaaagatgctggtgatgaagatttgaaaaaagcttatagaaagcttgctttgaagtttcatccagacaaaaaccatgcccctggagcaacacactgcttttaaaggtaaagtttccctttatgngacg

SEQ ID NO: 172 - DNA, 2183 bp, Homo sapiens
  CDS (777)..(1196)
aggacttcggaaccgccccgtcctcaagatcgaaaagcccagagccgcgcgctcaagcacggtgttgggggtggggtctcaggagcgcccagcaaggcgcccctgtcggcgtggacccgcgggctcaaaggcagttccccggtgacccgcccagcccctctatgcgaactcgaacgacagcaccacagcccgccagcgtcgagactcgcgctgtgccccaacccaggtgggcgccgcggagccgcgagcctgagcccgccctgcaggtgacccgcggcccttcctcctccaggtaccccttctcctgcggccccgtcccctataggtaacctttacctcccgcggctccttcccctccaagcgacccgcagcgcccgggccctccaggtgactgcgcccccgccaacccccgccccaccacacacacacaccccctcgccttcttccgccctactccctccaggtgaccccacccccgcagctcctcctcctccggacaacctgcagccccgcccctgcaggtgaacggcggcccagtccctgcaggtgacccgcggaccctccccgcccgtcctactaccgtcataggacgcctccgcaggcgcactggagccgattgcgcaggagccgattgcgcaggcgtggctctcacacgcgctgccctgttggcgttggtgcgggactgcgcaggcgcgcgggggcaagactggcagtgcgcctgcgccgcgtcggcgtgcggaacgccgcggtgtctcggcgcctctgcgcgcgggaagatggcggaacaggctaccaagtccgtgctgtttgtgtgtctgggtaacatttgtcgatcacccattgcagaagcagttttcaggaaacttgtaaccgatcaaaacatctcagagaattggagggtagacagcgcggcaacttccgggtatgagatagggaacccccctgactaccgagggcagagctgcatgaagaggcacggcattcccatgagccacgttgcccggcagattaccaaagaagattttgccacatttgattatatactatgtatggatgaaagcaatctgagagatttgaatagaaaaagtaatcaagttaaaacctgcaaagctaaaattgaactacttgggagctatgatccacaggtgtaccagcagtgtgtcaggtgctgcagagcgttcttggagaaggcccactgaggcaggttcgtgccctgctgcggccagcctgactagaccccaccctgaggtcctgcatttctcagtcggtgtgtaatcacgttccagggcccaaagcccagctctttgttcagttgacttactgtttcttaccttaaaaagtaattgtagatggaaatcagttgtgtttggcaggagaatcaataaaaatctttgattcagacagcttatggggtattttaaagcattcttagactagttgaacatctcactttgccccagttacaaaaatagtagaacaagcaacataaaacaatgaaggaaaacctcacttgaaggcccaggtcaacatctaagcctgttgagacttagataatcgagtctacctcttcagtaggtttgtgtggatggcctggaggcaggtgcttgctccccagtgctacctctctcttccctagggccttttgtggattgacagtagtcccctccgtagagctcacagtctagattagaagtgttttaatttctacacacccatagtgcacacttgtatattgaaaagatagggaagagagaaacatttatggaatcagtcgttggcaccttcaatacttcatgatttttgtcgagtttacttcatgaggaggtcagcccattggctcccatctgaaccactttgcctctgaaacttaattacatccagaaagaaggacacttgtatgctagtctatggtcagttgaggaatatgactgtttttatatgcacatgtaacccaaatgtccaatataaattggcttattttttaaaataattttaaaagttgggaaaagtgttattatttggcatgcttaaatattgaataagtattcttcatcagcatttaataaatgtataggcagatgtaaggtaatttctgtgtattttgagataatgtcaaaatcatgaatatttcaaaataaactggggagttataaaaatacaactagagatataaaaaaaaaaaa

SEQ ID NO: 173 - DNA, 1255 bp, Homo sapiens
  CDS (1)..(1128)
atgtgtcgggctaccctcgggcttcccctgccgcccattgtgatccagcccgctaggcgctccctgccgcccattgtgacgcctgccagccgcaggctgggtccccgaggcgggcggcatttaggctcggtctccacagccatggccgcgacgcaggagctgctgctgcagttgcagaaggataaccgagatggtcgccagcggaagcaggagctagagaagctgatgcgcgggctcgaggccgagagcgagagcctgcctcaaccagcgcctgcaggacctgagcgagcgggagcggagcggacccaggtgggggactcggccaggacttcccagtcctcaatcatgagcctgcggctggtccttcctggcgactgcgggatcctgagcgacccagtccgccttgtagcgccaacctcagtttccctctgcaggctgctgcggaggcgaagccaggaagcgctgcttctgcaaggggaggtgcgcgaggcggcgcgggagcgcgcgcagcgggtgcgcagaagactggaggaggcggagcgccacaaggaggacttgctcttctactacggaggggaactgcagagccagaagagcacggagcagcaactcgcagcccaattggtgacgctgcagaatgaactggagctggcggagaccaaatgcgccttgcaggaggagaagctgcagcaggacgcgctgcagacagcggaggcctgggccatattccaggagcagaccgtagtcctgcaggtgcggccccactcagacgccaaggtgcctcccgcctctcctcccccagacctggggcggtgtgacgggcagcttcgcggagtgcagtacagcaccgagtcgctcatggaggagatggccagggcggaccgagagacgcggctgttcggcggccctcgcgcgctggccatcaggcggtgcgtgctgggcgcgctgcaggtgctgctgacgctgccgctcctcttcctggggctgtcgctgctctggacggtgctgttggaccccggcgccgtctccgcgtggctctggagcctcacctcggagacgacgctgcgccgcctgcgctacacgctgtccccgctgctggagctgcgcgctaacgggcttctgccaacctaagtgcagcgccccgcgcctggctccaggtggactccagggcacctggctttatttctggtgcactcctctcctgagagtgtagaccaaggttgcctaataaactcaagggatgaaaaaaaaaaaa

SEQ ID NO: 174 - DNA, 1044 bp, Homo sapiens
  CDS (151)..(1041)
gattccttcctttcccctttcatttttccactgtgggtgttattatcctgacaatttgtcatacatttcctgtctttaaaaaataactgtatactaagcaaaactcaggaacaaggtgtggttattgattctctaaaattaagtgaggagatgaagcccaatctagatggtgttgatttattcaacaatggtggttctggaaacggtgaaacgaaaactgggctgagactgaaagcaataaatctgcctttggaaaatgaagtaactgaaatttcagctttgcaggtgcatttggatgaattccaaaaaatcttatggaaggaaagagaaatgcgcacagctttggaaaaagaaatagagagactggagtcggctttgtctctgtggaagtggaagtatgaagaactgaaagaatcaaagccaaaaaatgtgaaagagtttgacattcttcttggtcaacataatgatgaaatgcaagaactgtcaggcaatataaaggaagaatccaaatctcaaaacagcaaagacagagtgatttgtgagttaagagcagagctagagagattgcaagctgaaaatacctcggagtgggacaagagggaaatacttgaaagagaaaagcagggactggagagagaaaatagaaggctgaagatccaggtgaaagaaatggaagagcttttggataagaaaaatagattaagtgcaaactctcaaagtcctgatttcaagatgtcacaaattgatctgcaagaaaaaaaccaggaattactgaaccttcaacatgcctactataaactaaacagacaataccaggcaaatattgcagaactgactcatgcaaacaaccgagtggatcaaaatgaagcagaagtaaagaaactaagattacgagtggaagaactaaagcagggactcaaccaaaaagaagatgagcttgatgattccctgaatcagatccgtaagctccagaggtctctggatgaagagaaagaaagaaatgaaaacttagagactgaactcaggcacttgcaaaactggtaa

SEQ ID NO: 175 - DNA, 2291 bp, Homo sapiens
  CDS (1)..(1938)
atggacggtgaggcagtccgcttctgcacagataaccagtgtgtctccctgcacccccaagaggtggactctgtggcaatggctcctgcagcccccaagataccgaggctcgttcaggctaccccggcatttatggctgtgaccttggtcttctctcttgtgactctctttgtacacaaagtccccaggggccccagatgcacactctctgggcctctctgctcccagaaagatcattccacctccagctccaggcccaagccacagcttccctgggaacagataaaggccactgtccaagggggagcctcccaagaactgaggttcatgagggaaaccctgggagggtctttgctgctatctccccggttctggaactctacctctgtgtgggacagcgtatcctcccaggctcagggctggggatttgctgacctggaaaaatggaatgtctcagttcaacagcagacaagacctgttccgaagcctgtgcaagccgtaattctgggagacaacattactgggcatttaccttttgaacccaacaatcatcaccactttggcagggaggcagaaatgcgagagcttatccagacatttaaaggccacatggagaattccagtgcctgggtagtagaaatccagatgttgaagtgcagagtggacaatgtcaattcgcagctccaggtgctcggtgatcatctgggaaacaccaatgctgacatccagatggtaaaaggagttctaaaggatgccactacattgagtttgcagacacagatgttaaggagttccctggagggaaccaatgctgagatccagaggctcaaggaagaccttgaaaaggcagatgctttaactttccagacgctgaatttcttaaaaagcagtttagaaaacaccagcattgagctccacgtgctaagcagaggcttagaaaatgcaaactctgaaattcagatgttgaatgccagtttggaaacggcaaatacccaggctcagttagccaatagcagtttaaagaacgctaatgctgagatctatgttttgagaggccatctagatagtgtcaatgacttgaggacccagaaccaggttttaagaaatagtttggaaggagccaatgctgagatccagggactaaaggaaaatttgcagaacacaaatgctttaaactcccagacccaggcctttataaaaagcagttttgacaacactagtgctgagatccagttcttaagaggtcatttggaaagagctggtgatgaaattcacgtgttaaaaagggatttgaaaatggtcacagcccagacccaaaaagcaaatggccgtctggaccagacagatactcagattcaggtattcaagtcagagatggaaaatgtgaataccttaaatgcccagattcaggtcttaaatggtcatatgaaaaatgccagcagagagatacagaccctaaaacaaggaatgaagaatgcttcagccttaacttcccagacccagatgttagacagcaatctgcagaaggccagtgccgagatccagaggttaagaggggatctagagaacaccaaagctctaaccatggaaatccagcaggagcagagtcgcctgaagaccctccatgtggtcattacttcacaggaacagctacaaagaacccaaagtcagcttctccagatggtcctgcaaggctggaagttcaatggtggaagcttatattatttttctagtgtcaagaagtcttggcatgaggctgagcagttctgcgtgtcccagggagcccatctggcatctgtggcctccaaggaggagcaggcatttctggtagagttcacaagtaaagtgtactactggatcggtctcactgacaggggcacagagggctcctggcgctggacagatgggacaccattcaacgccgcccagaacaaagcgtgagtctagccaccatctggcgctgtcccaggcactgtctttggtggacctagctacacactgtgtgtcccttcccagtaagtggtagtgttgtgtgtatatgtgtgtgacgtgtgtggtgtgtatgtggtgtatgtgtggtgtgtgtgccatgtatgtggcatgtgtaatgcatgtggtgtgcgaggtgtatgtgtggtatgtgtgtgatgtgtgtgcgtttggacacacaggtgtggtcatcgctctcacctggactcctccacagagggtcattaggaaaggacaggtcctgaggctggcatgcagccagtgagtgggtctttctgtttttttccccctgccctactcag

SEQ ID NO: 176 - DNA, 570 bp, Homo sapiens
  CDS (337)..(501)
  misc_feature (1)...(570): n = a,t,c or g
cacaagtatagaaagctttgtagttctgactcagaaaaataacaattaaatcttccctctgcctttcctctttcttttgattcacttgactcattcagatgttcctataaagaagcaatttaagtctctatagctttacacagaactggtggtttcttctcttgtatcccaagcagttagtacatacatctagttaggaatgatcatctaatttatcagcagacctagacacaactgagaatgaaagaagacacaaataactattaagccaggacaagagattcctgataaatcaggaaatatggtcatactactttgaatgtagttatctattaaatgtgtctcttgtcattcaactgtaaagctgtgttaagtttgagccttatttctcttagcttcctttgttgcctggaattgtgtctggcacgttgtggtggcagaagaaatgttagtgcccctttaaaaatgttcatttatttaaaccattatactatattgatgtaggaactcatacccatcccatttgggggncctttttatgagnccattttctccagtatttccaaatgt

SEQ ID NO: 177 - DNA, 1193 bp, Homo sapiens
  CDS (957)..(1133)
caagtcctttcatgttatagaacattacatttgtcctttgcagctggtatctttagtttaaagaccagtgaaattcttaaccatgttcccattttaaaacaaagcgaacataaaaaatgactaattcttagaactgaagttctaggttttgctttaatagcttttaagtattgccacttataaccccattattaacaccacagtctgcatcaaaagcttacttaaaacatttagttttcatgagagtttcccaaaaataatttcataacaatcatttgttctaagagccatttcttaactcatcatgaactgtaatagattatgaagataagtttcaaaatttacataccagattttttaaaatgaagttaaaaggatggacatattgagggtcttatgcatgggcatactgaagggtttggagagacagaatgtgcatgaggtttgagaaggggagcatcacttccctatgtggaaataggaacggagcagcgttcattgtgtgggccttgagcccctcatccctttcactctaaggctggaagccacagcctgatgttctaaccatttgaacacttaacatttgttcaaagcctggctttgtaatcatttgaacattccattacatggaaggaacatggacttcatgtcagctctgcattttaaatcattcctccacagtgacttgacaagttattttacctcttgtctactggcccttacaacattttgtgtagtatatgtgttgggcaaataggatttatttttaccattgcaatccagacttcatattggaacgcactcaatattcagaagtttgaattctaccactctcaaacacagttcaaaagatagctgtttgagaatgcttcttaactaatactagtacaatatcttcaataatgtatgtaccttatagaaaatcttgaacagtacaagattttcataattaaggcatgcaaaactgcttgggctctttgattccaggtgtcctcttctcccttctgcttttgccatctatgttcaatataattctaacccagtctaagtatggagaaaattcctaccctgcctgcttttatagctcatcaaatttccctgtatcagctatcacttttctggtaggtgtagtctgatttctgtctgtcatgcctttgccacaatcctttctttgaagagtaggtaaaatgatg

SEQ ID NO: 178 - DNA, 1113 bp, Homo sapiens
  CDS (536)..(835)
tttcgtctggccacccccacagcccagagcactggcatcatctgtactatcggcctagtttcctgattgggggaaatgttgatgattaagtctggaattaatatggcttgtctgaacttacgagtaccacgcagagaccatcaggaatgtgtgcacaactatggaaagccttgcttctgaccccaatctctagcggctagttgctgtggctctggacactaacgggcctgagatctgaactgggctcacacagagcagtgtccccatggaggtggagctgaagaagggagccaccttcagatcacactggataatgcctacatggaaaacttatgatgagaacttcctgtagctggactacaagaacatttgtaaggtagtggaaaggggcagcaagatctatagatttaataacttatttctctgcagttggagcagaaaggtactgacctcctggtgatagcaatggaaaattatggctccttgggcagcaaaaagggtgtagaccttcctggtgactgtggacctgcttgccatgtcagaaaaggacatccaggatctgaagtttggggtagaatgggatgtggatatggtgtttgcctctttcatccatgtggcatctaatgtccatgaaattagaaaggcaattattgcaaactggagcaaggtgcccacttgcccaccagagttaggctcttaccttcccagaggaactgagacccacagctatttttatatatcttacagttcagatcagatacaaatatgtaaacctctacattatttctatgtagaaattatgatactctttaagcctgtcacagattttgttatttaatgcaaagaagcacatatattactatgggacacttttggtttgtttaaatattttgatagttgtattttaatgtaaagggtttcatttgtaatcttatacagatggtccccaacttacaatggttcaacttatgatttttcatctttacaacggcatgaaagcaatacattttcagtagaaactgtaggtcaaatactcatacaaccattctgtttttcactttactgcagtatttaataaacatatgagatattcaagattttaaaaaaaaaaaa

SEQ ID NO: 179 - DNA, 2505 bp, Homo sapiens
  CDS (212)..(2449)
aagtgatgtgggtaggacaggttgtgttagccgcaggtgccagaacacagattgtataaaaggctgggggctggtggggagcaggggaagggaatgtgaccaggtctaggtctggagtttcagcttggacactgagccaagcagacaagcaaagcaagccaggacacaccatcctgccccaggcccagcttctctcctgccttccaacgccatggggagcaatctcagcccccaactctgcctgatgccctttatcttgggcctcttgtctggaggtgtgaccaccactccatggtctttggcccggccccagggatcctgctctctggagggggtagagatcaaaggcggctccttccgacttctccaagagggccaggcactggagtacgtgtgtccttctggcttctacccgtaccctgtgcagacacgtacctgcagatctacggggtcctggagcaccctgaagactcaagaccacttcgagaacggggaatactggccccggtctccctactacaatgtgagtgatgagatctctttccactgctatgacggttacactctccggggctctgccaatcgcacctgccaagtgaatggccgatggagtgggcagacagcgatctgtgacaacggagcggggtactgctccaacccgggcatccccattggcacaaggaaggtgggcagccagtaccgccttgaagacagcgtcacctaccactgcagccgggggcttaccctgcgtggctcccagcggcgaacgtgtcaggaaggtggctcttggagcgggacggagccttcctgccaagactccttcatgtacgacacccctcaagaggtggccgaagctttcctgtcttccctgacagagaccatagaaggagtcgatgctgaggatgggcacggcccaggggaacaacagaagcggaagatcgtcctggacccttcaggctccatgaacatctacctggtgctagatggatcagacagcattggggccagcaacttcacaggagccaaaaagtgtctagtcaacttaattgagaaggtggcaagttatggtgtgaagccaagatatggtctagtgacatatgccacataccccaaaatttgggtcaaagtgtctgaagcagacagcagtaatgcagactgggtcacgaagcagctcaatgaaatcaattatgaagaccacaagttgaagtcagggactaacaccaagaaggccctccaggcagtgtacagcatgatgagctggccagatgacgtccctcctgaaggctggaaccgcacccgccatgtcatcatcctcatgactgatggattgcacaacatgggcggggacccaattactgtcattgatgagatccgggacttgctatacattggcaaggatcgcaaaaacccaagggaggattatctggatgtctatgtgtttggggtcgggcctttggtgaaccaagtgaacatcaatgctttggcttccaagaaagacaatgagcaacatgtgttcaaagtcaaggatatggaaaacctggaagatgttttctaccaaatgatcgatgaaagccagtctctgagtctctgtggcatggtttgggaacacaggaagggtaccgattaccacaagcaaccatggcaggccaagatctcagtcattcgcccttcaaagggacacgagagctgtatgggggctgtggtgtctgagtactttgtgctgacagcagcacattgtttcactgtggatgacaaggaacactcaatcaaggtcagcgtaggaggggagaagcgggacctggagatagaagtagtcctatttcaccccaactacaacattaatgggaaaaaagaagcaggaattcctgaattttatgactatgacgttgccctgatcaagctcaagaataagctgaaatatggccagactatcaggcccatttgtctcccctgcaccgagggaacaactcgagctttgaggcttcctccaactaccacttgccagcaacaaaaggaagagctgctccctgcacaggatatcaaagctctgtttgtgtctgaggaggagaaaaagctgactcggaaggaggtctacatcaagaatggggataagaaaggcagctgtgagagagatgctcaatatgccccaggctatgacaaagtcaaggacatctcagaggtggtcacccctcggttcctttgtactggaggagtgagtccctatgctgaccccaatacttgcagaggtgattctggcggccccttgatagttcacaagagaagtcgtttcattcaagttggtgtaatcagctggggagtagtggatgtctgcaaaaaccagaagcggcaaaagcaggtacctgctcacgcccgagactttcacatcaacctctttcaagtgctgccctggctgaaggagaaactccaagatgaggatttgggttttctataaggggtttcctgctggacaggggcgtgggattgaattaaaacagctgcgacaac

SEQ ID NO: 180 - DNA, 1964 bp, Homo sapiens
  CDS (465)..(1511)
actcaacatgcgctgctcgccgggaggcgtctggctggcgctggccgcgtcgctcctgcacgtgtccctgcaaggcgagttccagaggaagctttacaaggagctggtcaagaactacaatcccttggagaggcccgtggccaatgactcgcaaccactcaccgtctacttctccctgaacctcctgcagatcatggacgtggatgagaagaaccaagttttaaccaccaacatttggctgcaaatgtcttggacagatcactatttacagtggaatgtgtcagaatatccaggggtgaagactgttcgtttcccagatggccagatttggaaaccagacattcttctctataacagtgctgatgagcgctttgacgccacattccacactaacgtgttggtgaatccttctgggcattgccagtacctgcctccaggcatattcaagagttcctgctacatcgatgtacgctggtttccctttgatgtgcagcactgcaaacaagtttgggtcctggtcttacggaggctggtccttggatctgcagatgcaggaggcagatatcagtggctatatccccaatggagaatgggacctagtgggaatccccggcaagaggagtgaaaggttctatgagtgctgcaaagagccctaccctgatgtcaccttcacagtgaccatgcgccgcaggacactctactatggcctcaacctgctgatcccctgtgtgctcatctccgccctcgccctgctggtgttcctgcttcctgcagattccggggagaagatttccctggggataacagtcttactctctcttaccgtcttcatgctgctcgtggctgagatcatgcccgcaacatccgattcggtaccattgatagcccagtacttcgccagcaccatgatcatcgtgggcctctcggtggtggtgacggtgatcgtgctgcagtaccaccaccacgaccccgacgggggcaagatgcccaagtggaccagagtcatccttctgaactggtgcgcgtggttcctgcgaatgaagaggcccggggaggacaaggtgcgcccggcctgccagcacaagcagcggcgctgcagcctggccagtgtggagatgagcgccgtggcgccgccgcccgccagcaacgggaacctgctgtacatcggcttccgcggcctggacggcgtgcactgtgtcccgacccccgactctggggtagtgtgtggccgcatggcctgctcccccacgcacgatgagcacctcctgcacggtgggcaaccccccgagggggacccggacttggccaagatcctggaggaggtccgctacattgccaaccgcttccgctgccaggacgaaagcgaggcggtctgcagcgagtggaagttcgccgcctgtgtggtggaccgcctgtgcctcatggccttctcggtcttcaccatcatctgcaccatcggcatcctgatgtcggctcccaacttcgtggaggccgtgtccaaagactttgcgtaaccacgcctggttctgtacatgtggaaaactcacagatgggcaaggcctttggcttggcgagatttgggggtgctaatccaggacagcattacacgccacaactccagtgttcccttctggctgtcagtcgtgttgcttacggtttctttgttactttaggtagtagaatctcagcactttgtttcatattctcagatgggctgatagatatccttggcacatccgtaccatcggtcagcagggccactgagtagtcattttgcccattagcccactgcctggaaagcccttcggagagctccccatggctcctcaccaccgagacagttggttttgcatgtctgcatgaaggtctacctgaaaattcaacatttgctttttgcttgtgtacaaacccagattgaagctaaaataaaccagactcactaaatcctttccaaaaaaaaaaaa

SEQ ID NO: 181 - DNA, 2211 bp, Homo sapiens
  CDS (7)..(2106)
caaggaatgccaggcatcccagggctgtcaggaatccctgggctgcctgggaggcccggccacatcaaaggagtcaagggagacatcggagtccccggcatccccggtttgccaggattccctggggtggctggcccccctggaattacgggattcccaggattcataggaagccggggtgacaaaggtgccccagggagagcaggcctgtatggcgagattggcgcgactggtgatttcggtgacatcggggacactataaatttaccaggaagaccaggcctgaagggggagcggggcaccactggaataccaggtctgaagggattctttggagagaagggaacagaaggtgacatcggcttccctgggataacaggcgtgactggagtccaaggccctcctggacttaaaggacaaacaggctttccagggctgactgggcctccagggtcgcagggagagctggggcggattggactgcctggtggcaaaggagatgatggctggccgggagctccgggcttaccaggttttccgggactccgtgggatccgcggcttacacggcttgccaggcaccaagggctttccaggatccccaggttctgacatccacggagacccaggcttcccaggccctcctggggaaagaggtgacccaggagaggccaacacccttccaggccctgtgggagtcccaggacagaaaggagaccaaggagctccaggggaacgaggcccacctgggagcccaggacttcaggggttcccaggcatcacacccccttccaacatctctggggcacctggtgacaaaggggcgccagggatatttggcctgaaaggttatcggggcccaccagggccaccaggttctgctgctcttcctggaagcaaaggtgacacagggaacccaggagctccaggaaccccagggaccaaaggatgggccggggactccgggccccagggcaggcctggtgtgtttggtctcccaggagaaaaagggcccaggggtgaacaaggcttcatggggaacactggacccaccggggcggtgggcgacagaggccccaagggacccaagggagacccaggattccctggtgcccccgggactgtgggagcccccgggattgcaggaatcccccagaagattgccgtccaaccagggacagtgggtccccaggggaggcgaggcccccctggggcaccgggggagatggggccccagggcccccccggagaaccaggttttcgtggggctccagggaaagctgggccccaaggaagaggtggtgtgtctgctgttcccggcttccggggagatgaaggacccataggccaccaggggccgattggccaagaaggtgcaccaggccgtccagggagcccgggcctgccgggtatgccaggccgcagcgtcagcatcggctacctcctggtgaagcacagccagacggaccaggagcccatgtgcccggtgggcatgaacaaactctggagtggatacagcctgctgtacttcgagggccaggagaaggcgcacaaccaggacctggggctggcgggctcctgcctggcgcggttcagcaccatgcccttcctgtactgcaaccctggtgatgtctgctactatgccagccggaacgacaagtcctactggctctctaccactgcgccgctgcccatgatgcccgtggccgaggacgagatcaagccctacatcagccgctgttctgtgtgtgaggccccggccatcgccatcgcggtccacagtcaggatgtctccatcccacactgcccagctgggtggcggagtttgtggatcggatattccttcctcatgcacacggcggcgggagacgaaggcgtgggccaatcactggtgtcaccgggcagctgtctagaggacttccgcgccacaccattcatcgaatgcaatggaggccgcggcacctgccactactacgccaacaagtacagcttctggctgaccaccattcccgagcagagcttccagggctcgccctccgccgacacgctcaaggccggcctcatccgcacacacatcagccgctgccaggtgtgcatgaagaacctgtgagccggcgcgtgccaggaagggccattttggtgcttattcttaacttattacctcaggtgccaacccaaaaattggttttatttttttcttaaaaaaaaaaaa

SEQ ID NO: 182 - DNA, 562 bp, Homo sapiens
  CDS (264)..(407)
tagttgtatatcattgtatatcatactcctcctattccttaatctggtaatgtattatcaatctgaaaattatcaagcataaagaatgttttaatgaagtaagaagtgttgtgatataatgaataaaagcccgtttggctttccttttaaatgtcattctaagtatgaattttgctcttggatttgaaagcagtgaaattacagagaaatggaagtaattctcttgtaaaaacacatcagagttacttctcagtttaaaagaaatgcatttattgttcttggcatatgtaagaatttgtattaaatatgtaataatcttgactttctttttaaaaatcaaaatcatgagtactttgtaccaactaaagcatttgttttatatcaaaattattaaaagaaatatattttaaacaagttaggtaaccttaatgtatattatgaggaaagtcataatcaaatcagaacttactatgttggaaattaacttgtgataaaaagaaaaaaatccaccctaaattgtattccctgatgggaagaatcttatctaggctaagtgacgaaa

SEQ ID NO: 183 - DNA, 760 bp, Homo sapiens
  CDS (44)..(583)
cgggtaagatggtgtatggagtaatgaagtctagtacaattttatgaagcctacacaggaaatgaatatcagcttagtctggtgcctacttgttttgtcttttgcaatcaaagttctattttcattaactacacactattttaaagtagaagatggtggtgaaagatctgtttgtgtcacctttggattttttttctttgtcaaagcaatggcagtgttgattgtaacagaaaattatctggaatttggacttgaaacagggtttacaaatttttcagacagtgcgatgcagtttcttgaaaagcaaggtttagaatctcagagtcctgtttcaaaacttactttcaaatttttcctggctattttctgttcattcattggggcttttttgacatttcctggattacgactggctcaaatgcatctggatgccctgaatttggcaacagaaaaaattacacaaactttacttcatatcaacttcttggcacctttatttatggttctgctctgggtaaaaccaatcaccaaagactacattatgaacccaccactgggcaaagaaatttccccatctggaagatgaagataatagtatctaactcacaaggttatcattggaataaatgaaagaacacatgtaatgcaaccagctggaattaagtgcttaataaatgttcttttcactgctttgcctcatcagaattaaaatagaaatatgtgactagtaaaaaaaataaaaaaaaaaaattcctcggtc

SEQ ID NO: 184 - DNA, 2081 bp, Homo sapiens
  CDS (28)..(1938)
cctgagtaccccttcaagaccaagcaaatgatgtccccagtcagcaagacccaggagcacggacttttttatggtgaccagcaccccgggatgctccacgagatggtcaagccctaccctgctcctcagcctgtgagaacagatgtggccgtcctgcggtaccagccaccccctgagtatggggtaacgagccgcccatgccaacttccgttcccatcaaccatgcagcagcacagccccatgtcctcccagacctcttccgccagcgggccactgcactctgtctccctgccgcttccactcccgatggccctgggtgctccacagcccccgcctgccgcctcccccagccagcagcttggtccagatgcctttgcgattgtggagcgagcccagcaaatggtggagatattaacagaggagaaccgggtgcttcaccaggaacttcagggttactacgacaatgccgacaagctccacaagtttgaaaaagaacttcagagaatttcggaagcctatgaaagtctggtcaagtctaccaccaagcgagaatcgctggacaaggccatgagaaacaaattggaaggcgagattagaagacttcatgatttcaacagagacctccgagatcgactagagactgctaacaggcaactatccagcagggaatacgaagggcatgaagacaaagctgcagaggggcattatgcttcccagaacaaagaattcttgaaggaaaaggagaaattagaaatggagttagcagcagtgcggactgcaagtgaggaccatcggagacacatcgagatcctggaccaggctttgagcaacgcccaggccagggtcatcaagctggaagaggagttacgagagaagcaagcatatgttgagaaagttgagaagctgcagcaggccctgacccagctgcagtctgcatgtgagaagcgagaacagatggagcggagactgcggacttggctggagagagagctggatgcactgagaacccagcagaaacatggaaatggccagccagccaacatgccggaatacaatgccccagccctcctggaacttgtgcgggagaaggaggagcggatcctggccctggaggccgacatgacaaagtgggagcagaagtacctggaggagagcaccatccgacactttgccatgaatgccgcagccactgcagcagctgagagggacaccacgatcatcaaccactcacggaatggcagctacggagagagctcgctggaggcccacatctggcaagaggaggaggaggtggtgcaggccaacagaaggtgtcaggacatggaatacactattaaaaatctccatgccaaaatcatagagaaagatgctatgattaaggtcctgcagcagcgatctcgtaaagatgccgggaagacagactcctccagcctacgtcctgcccgctccgttccatccatagcagcagctactgggacacactctcgccagacctctcttaccagcagccagctggctgaggaaaagaaggaagagaagacctggaaggggagcataggattgctgctggggaaggagcaccatgagcatgcctctgccccactgctgccacccccacccacctcagcactgtcctccatagcctccactacggcagccagcagtgcccacgccaagacaggcagcaaggacagcagcacacagactgacaagagtgccgagctcttctggcccagcatggcctcccttcccagccgcggccggctgagcacgacccctgctcacagccccgtcctgaaacacccagcggccaaagggaccgcagagaaactggagaactctcctggccatgggaagtcgcctgaccacagaggccgggtcagcagcttgctgcacaagcccgagttccctgatggagagatgatggaagtcctcatctaactgccatccctgtggaatttcagtacagaacactgacaaacaatgaaagcggcagagaaagaagaaagacctagaaggttgtagatgggaaatcaggaatgatttgaactgataaagatttcagactcataagaacacat

SEQ ID NO: 185 - DNA, 630 bp, Homo sapiens
  CDS (349)..(540)
cctgtctcatcacctgtgaagcagacgcaagtttcttgaaagtatttttcaagcacgaacgtgcatgacgggtaaaatatctagaccgcatcactgcgcagccactagtcagtgcttcctaggagtcaagtttgtagtgtgaacttgatacatacggacacaagtttctgtcctgaagcttgcagtcactctgggaggtggtggatggtattactgggcccgtttttcattggggaaactgaggctccaacactgaaataattcacttcacctggagttgagccaagattctctttactccaaagccagcactccttctgagaacaggactttgatttggatggacggatgttgctgggggcctcagcacagggtctttgggctcacagctggacatgcagctgttcagcggcagctgcggtctgtccacccaggcggagactggatgcaacagtttcaggcggggttcctccctccccaggtgcctgcccacctctcccttacatgggatgtctctcttcttcctccttgcctggtccctaaagcacttgagtttgtggttcattttttaaaaaatgatatattttatttaacccagtatattaaaaatgtcatttcagaaaaaaaaaa

SEQ ID NO: 186 - DNA, 1225 bp, Homo sapiens
  CDS (57)..(914)
ggcctcgaacgggatggcagaggaggtgagcaccctgatagaaggccacggtcctgatgcggcagcctgggcgggtgcaggagatcgtgggcgccctccgcaagggcggcggagaccggttacaggtgatttctgattttgacatgaccttgagcaggtttgcatataatggaaagcgatgcccttcttcttacaatattctggataatagcaagatcatcagtgaggagtgtcggaaagagctcacagcgctccttcaccactattacccaattgagatcgacccacaccggaccgtcaaggagaagctacctcatatggtggaatggtggaccaaagcgcacaatctcctatgtcagcagaagattcagaagtttcagatagcccaggtggttagagagtccaatgcaatgctcagggagggatataagaccttcttcaacacactctaccataacaacattccccttttcatcttttctgcgggcattggtgatatcctggaagaaattatccgacagatgaaagtgttccaccccaacatccacatcgtgtctaactacatggattttaatgaagatggttttctccagggatttaagggccagctgatacacacatacaacaagaacagctctgtgtgtgagaactgtggttacttccagcaacttgagggcaaaaccaatgtcatcctgctgggagactctatcggggacctcaccatggccgatggggttcctggtgtgcagaacattctcaaaattggcttcctgaatgacaaggtggaggagcggcgggagcgctacatggactcctatgacatcgtgctggagaaagacgagactctggatgtggtcaacgggctactgcagcacatcctgtgccagggggtccagctggagatgcaaggcccctgaaggcgcaggctccagcccggcctgcaggccgtggtgaggaggggcgcctccccagagtctgctcccccgtgaacacagagcagaggccagggtggccagcagtggctgggtccttccgcgcccctccgtcctcctttccctgagcaccttcatcaccagaggcttgaaggaaccccgccatgtggcagggcacaggcactgttcctggtgaaccttggaccacagcatgtcagtgctctagggattgtctactccagggattttcttcaaaattgttaaacatgggaagttcaaacaaaaaaaaaaaa

SEQ ID NO: 187 - DNA, 2655 bp, Homo sapiens
  CDS (316)..(2001)
atggagaaatacggcacaaaaatgttaagtaatttgcgggctcttggctttgggcctcagtgcaagtccattggaaaaggcagctgcaacaatctagtggtcaccagcagtcccatgatggttcagcgactgggactcatttcacctccagcaagccaggtctctacagcatgcaaccagatcagtcctagcttacagagggcaatgaatgcagccaacctgaatatacctccttcagataccaggtcccttatttcgcgtgagtctttggcgtccacgaccttgagtctgacggaaagtcagtcggcctcaagcatgaagcaggagtggtcccagggctacagggccctcccttcgctctccaaccacggctctcagaatggccttgatctaggggatctccttagccttcctcccgggacatccatgtccagcaatagtgtctctaactcattaccatcctacctttttggcacggaaagtagccactctccttaccctagtcctcggcactcatccaccaggtcccactcggcccgctccaagaagagagcgctgtccttgtccccgctgtccgatggcatcgggatagatttcaataccatcatccgcacgtcgcccacgtccttggtggcctacatcaacgggtcgagggcttcgccggccaacctgtccccgcagccggaggtctacgggcatttcctgggcgtgcgcggcagctgcattccccagccgcgcccggtgcccggcagccagaagggcgtgctggtggcccctggaggcctggcgctgccggcctacggcgaggacggggccctggagcacgagcgcatgcaacagctggagcacggcggcctgcagccaggcctggtcaaccacatggtggtgcagcatggcctgccgggccccgacagccagtcggccggcctgttcaagaccgaacgcctggaggagttcccgggcagcaccgtagacctaccccccgcgcctccgctccctcctctgccgccgcccccaggccccccacccccttaccatgcccatgcgcaccttcaccacccggagctcgggccccacgcccagcagctggccttgccccaggccaccctggacgacgacggggagatggacggcatcgggggcaagcattgctgccgctggatcgactgcagcgccctgtacgaccagcaggaggagctcgtgcggcacatcgagaaggtccacatcgaccagcgcaaaggggaggacttcacttgcttctgggccggttgccctcgaagatacaagcccttcaacgcccgctataaactgctgatccacatgagagtccactctggggagaagcccaacaagtgtacgtttgaaggttgcgagaaggccttttcaaggcttgaaaatctcaagatccacttgcggagccacacaggcgagaagccgtatttgtgccagcatccgggttgtcagaaggccttcagtaactccagtgaccgcgccaaacaccagcggacgcatctggacactaaaccttatgcttgtcaaattccaggatgtaccaaacgctacacagacccaagttccctaagaaagcatgtgaaggcacattctcccaaagagcaacaagcaaggaaaaagttgcggtccagcacagagctccatccaaacctgctcacagattgcctcaccgtgcagtccctgcagccggccacttcccctaaaaatgctgctgctgaagggaccgtgggacgctcccctggacccggccctgacctctattcagctcccattttctccagcaattattcaagccgaagtggaacagctgctggggccgtaccacccccacatcctgtcagtcacccttctccaggacataatgtacaggggagccctcacaacccctcctcccagttacctccactcacagctgtggacgcaggagctgagagaggtcaggcccgggtccaggggagcgtcccacggtcccttcagcagcagcatctctaggggaagtggccggctgcagggactgcacggtgaggcaatctgtgagcaggtctggatggagctctgtgctggaccgcaactaagaggacaaaacggaagagacatcgataaggagagccggtccttggaatattttcctgggaaggcatcatgctctatcagtgcaactcagcccacaaaaatttatcaagcagcaactacgggtcctctgaacgggccacaccacggttgagccattgtgacccctgcgacacacaggtccaggcctcctggagtcacaaagctttgagcaacaggagaaccactaaagaagaagaaacagctagctcctgccttaactgattaaccgaacttgcaacattccaccattgtgatatgttcctgccctaccctaaataatcaatcggccttgtgatatcctgccatgtgaactccctccacctcgtgactatgcaccttgtgacattcttcccctgcccgaaaagactgccccaactgtaaccttccactacctaatccaaactataaaaccagtccactcccacggccttcgctgactcctttcagactcagccgtcgccggagtgataacagcctgtgtcccaaaaaaaaaaaccgggtttgtggggcggaagtgagccggctggtcgc

SEQ ID NO: 188 - DNA, 1120 bp, Homo sapiens
  CDS (110)..(1030)
ctgtctttgcgttttggtgtgctgttggtgctcctgtattgctggtgtttattgttcagtcccgtgtagtattgatgttgacggaagatgaagaattataaagcataagatgaaaaagattgcacaatattgccgcgtactacaggaaggtcctggtttgtcccttattaggtttacattgcgccgtttctcaatgtgggaggtctccttatgtcgtcagcgagcccatttggggcccagtgagttccagatggaccggaacttcataaggataggatgcatctatatcataaatctcaagaggacctgggagaagcttctgctggcagctcgtgcaattgttgccattgaaaaccctgctgatgtcagtgttatatcctccaggaatactggccagagggctgtgctgaagtttgctgctgccactggagccactccaattgctggccgcttcactcctggaaccttcactaaccagatccaggcagccttccgggagccacggcttcttgtggttactgaccccagggctgaccaccagcctctcacggaggcatcttatgttaacctacctaccattgcgctgtgtaacacagattctcctctgcgctatgtggacattgccatcccatgcaacaacaagggagctcactcagtgggtttgatgtggtggatgctggctcgggaagttctgcgcatgcgtggcaccatttcccgtgaacacccatgggaggtcatgcctgatctgtacttctacagagatcctgaagagattgaaaaagaagagcaggctgctgctgagaaggcagtgaccaaggaggaatttcagggtgaatggactgctcccgctcctgagttcactgctactcagcctgaggttgcagactggtctgaaggtgtacaggtgccctctgtgcctattcagcaattccctactgaagactggagcgctcagcctgccacggaagactggtctgcagctcccactgctcaggccactgaatgggtaggagcaaccactgactggtcttaagctgttcttgcataggctcttaagcagcatggaaaaatggttgatggaaaataaacatcagtttctaaaagttgtaaaaaaaaaaaa

SEQ ID NO: 189 - DNA, 705 bp, Homo sapiens
  CDS (53)..(544)
tttcgtggcggctgcggttgctgcagccttcagtctccacccggactacgccatgttggggtttgtgggtcgggtggccgctgctccggcctccggggccttgcggagactcaccccttcagcgtcgctgcccccagctcagctcttactgcgggccgctccgacggcggtccatcctgtcagggactatgcggcgcaaacatctccttcgccaaaagcaggcgccgccaccgggcgcatcgtggcggtcattggcgcagtggtggacgtccagtttgatgagggactaccaccaattctaaatgccctggaagtgcaaggcagggagaccagactggttttggaggtggcccagcatttgggtgagagcacagtaaggactattgctatggatggtacagaaggcttggttagaggccagaaagtactggattctggtgcaccaatcaaaattcctgttggtcctgagactttgggcagaatcatgaatgtcattgaagaagctgtggcaaaagctgataagctggctgaagagcattcatcgtgaggggtctttgtcctctgtactgtctctctccttgcccctaacccaaaaagcttcatttttctgtgtaggctgcacaagagccttgattgaagatatattctttctgaacagtatttaaggtttccaataaaatgtacacccctcagaaaaaaaaaaaa

SEQ ID NO: 190 - DNA, 432 bp, Homo sapiens
  CDS (10)..(216)
tttcgtgccatgttggggtttgtgggtcgggtggccgctgctccggcctccggggccttgcggagactcaccccttcagcgtcgctgcccccagctcagctcttactgcgggccgctccgacggcggtccatcctggtaagtgcttttctctaggagctaacgttccattttgccgccccatgaccttgagccggggaacgatggtagctcgggcctaagggatccgtggtgttaaaaggatgcctggagccgcgtcttgctctctaatggctggagaacaagaatgggacacccataggaggtttcttcgacccagctctgtcccattttgtataaagtcctttgtgtgacggaaaaggtgcgggcaggtgcgttgaccttccggttgaataggggtactgaactctcgaaaaatggggtcttgtgcatgc

SEQ ID NO: 191 - DNA, 961 bp, Homo sapiens
  CDS (5)..(553)
cgccatgttggggtttgtgggtcgggtggccgctgctccggcctccggggccttgcggagactcaccccttcagcgtcgctgcccccagctcagctcttactgcgggccgctccgacggcggtccatcctggtgagagcacagtaaggactattgctatggatggtacagaaggcttggttagaggccagaaagtactggattctggtgcaccaatcaaaattcctgttggtcctgagactttgggcagaatcatgaatgtcattggagaacctattgatgaaagaggtcccatcaaaaccaaacaatttgctcccattcatgctgaggctccagagttcatggaaatgagtgttgagcaggaaattctggtgactggtatcaaggttgtcgatctgctagctccctatgccaagggtggcaaaattgggctttttggtggtgctggagttggcaagactgtactgatcatggagttaatcaacaatgtcgccaaagcccatggtggttactctgtgtttgctggtgttggtgagaggacccgtgaacggcaatgatttatacccatgaaatgattgaatctggtgttatcaacttaaaagatgccacctctaaggtagcgctggtatatggtcaaatgaatgaaccacctggtgctcgtgcccgggtagctctgactgggctgacctgtgtgtgatacttcagagaccaaggacggtcaagatggtactggtaattatgataccatccttcgcttaccagggtggtcagaggtgtctgcttattggcgatccttcctgtgggggataagctacctgggcctgactgggctatgccggaagattcccacagaggttcccctcgaggattatgcccaaaatgctgcccccgtatgtgccttctcatgatcgctccctgcgcaccggccttaactctagcacttggaaacggggatcaccatg

SEQ ID NO: 192 - DNA, 1083 bp, Homo sapiens
  CDS (53)..(844)
tttcgtggcggctgcggttgctgcagccttcagtctccacccggactacgccatgttggggtttgtgggtcgggtggccgctgctccggcctccggggccttgcggagactcaccccttcagcgtcgctgcccccagctcagctcttactgcgggccgctccgacggcggtccatcctgtcagggactatgcggcgcaaacatctccttcgccaaaagcaggcgccgccaccgggcgcatcgtggcggtcattggcgcagtggtggacgtccagtttgatgagggactaccaccaattctaaatgccctggaagtgcaaggcagggagaccagactggttttggaggtggcccagcatttgggtgagagcacagtaaggactattgctatggatggtacagaaggcttggttagaggccagaaagtactggattctggtgcaccaatcaaaattcctgttggtcctgagactttgggcagaatcatgaatgtcattggagaacctattgatgaaagaggtcccatcaaaaccaaacaatttgctcccattcatgctgaggctccagagttcatggaaatgagtgttgagcaggaaattctggtgactggtatcaaggttgtcgatctgctagctccctatgccaagggtggcaaaattggggcttttggtggtgctggagttggcaagactgtactgatcatggagttaatcaacaatgtcgcccaaagcccatgggtggttactctgtgtttgctggtgttgggtgagaggacccggacggccatgatttataccatgacatgcttggatcctggtgttttccatcttaaaagatggcactcctaatgtagcgccgggttttgtcccatgtaattaacccccggtggtcctgccggtagcctacatgggcggacgtggcgaaaaaacttcgcagaacccaaggtcccagtttggcgttttttggaaaacttttcgtccccgccgggggcgaaagtgtgccttggggcgccccctcgtggggaacaccccgccgactgtgtgttgcgagaaacacacagaggacatcccggctttgttatgaa

SEQ ID NO: 193 - DNA, 2568 bp, Homo sapiens
  CDS (4)..(2442)
cagatgaagagcttggccggtttcgagtcgctggcctgcagcttccctgtggtttcccgaggcctccttgcttcccgctctccgaggagcctttcatccgaaggcgggacgatgccggataatcggcagccgaggaaccggcagccgaggatccgctccgggaacgagcctcgttccgcgcccgccatggaaccggatggtcgcggtgcctgggcccacagtcgcgccgcgctcgaccgcctggagaagctgctgcgctgctcgcgttgtactaacattctgagagagcctgtgtgtttaggaggatgtgagcacatcttctgtagtaattgtgtaagtgactgcattggaactggatgtccagtgtgttacaccccggcctggatacaagacttgaagataaatagacaactggacagcatgattcaactttgtagtaagcttcgaaatttgctacatgacaatgagctgtcagatttgaaagaagataaacctaggaaaagtttgtttaatgatgcaggaaacaagaagaattcaattaaaatgtggtttagccctcgaagtaagaaagtcagatatgttgtgagtaaagcttcagtgcaaacccagcctgcaataaaaaaagatgcaagtgctcagcaagactcatatgaatttgtttccccaagtcctcctgcagatgtttctgagagggctaaaaaggcttctgcaagatctggaaaaaagcaaaaaaaaaaaactttagctgaaatcaaccaaaaatggaatttagaggcagaaaaagaagatggtgaatttgactccaaagaggaatctaagcaaaagctggtatccttctgtagccaaccatctgttatctccagtcctcagataaatggtgaaatagacttactagcaagtggctccttgacagaatctgaatgttttggaagtttaactgaagtctctttaccattggctgagcaaatagagtctccagacactaagagcaggaatgaagtagtgactcctgagaaggtctgcaaaaattatcttacatctaagaaatctttgccattagaaaataatggaaaacgtggccatcacaatagactttccagtcccatttctaagagatgtagaaccagcattctgagcaccagtggagattttgttaagcaaaccgtgccctcagaaaatataccattgcctgaatgttcttcaccaccttcatgcaaacgtaaagttggtggtacatcagggaggaaaaacagtaacatgtccgatgaattcattagtctttcaccaggtacaccaccttctacattaagtagttcaagttacaggcaagtgatgtctagtccctcagcaatgaagctgttgcccaatatggctgtgaaaagaaatcatagaggagagactttgctccatattgcttctattaagggcgacataccttctgttgaataccttttacaaaatggaagtgatccaaatgttaaagaccatgctggatggacaccattgcatgaagcttgcaatcatgggcacctgaaggtagtggaattattgctccagcataaggcattggtgaacaccaccgggtatcaaaatgactcaccacttcacgatgcagccaagaatgggcacgtggatatagtcaagctgttactttcctatggagcctccagaaatgctgttaatatatttggtctgcggcctgtcgattatacagatgatgaaagtatgaaatcgctattgctgctaccagagaagaatgaatcatcctcagctagccactgctcagtaatgaacactgggcagcgtagggatggacctcttgtacttataggcagtgggctgtcttcagaacaacagaaaatgctcagtgagcttgcagtaattcttaaggctaaaaaatatactgagtttgacagtacagtaactcatgttgttgttcctggtgatgcagttcaaagtaccttgaagtgtatgcttgggattctcaatggatgctggattctaaaatttgaatgggtaaaagcatgtctacgaagaaaagtatgtgaacaggaagaaaagtatgaaattcctgaaggtccacgcagaagcaggctcaacagagaacagctgttgccaaagctgtttgatggatgctacttctatttgtggggaaccttcaaacaccatccaaaggacaaccttattaagctcgtcactgcaggtgggggccagatcctcagtagaaagcccaagccagacagtgacgtgactcagaccatcaatacagtcgcataccatgcgagacccgattctgatcagcgcttctgcacacagtatatcatctatgaagatttgtgtaattatcacccagagagggttcggcagggcaaagtctggaaggctccttcgagctggtttatagactgtgtgatgtcctttgagttgcttcctcttgacagctgaatattataccagatgaacatttcaaattgaatttgcacggtttgtgagagcccagtcattgtactgtttttaatgttcacatttttacaaataggtagagtcattcatatttgtctttgaatc

SEQ ID NO: 194 - DNA, 361 bp, Homo sapiens
  CDS (83)..(310)
gctggcctgcagcttccctgtggtttcccgaggcctccttgcttcccgctctccgaggagcctttcatccgaaggcgggacgatgccggataatcggcagccgaggaaccggcagccgaggatccgctccgggaacgagcctcgttccgcgcccgccatggaaccggatggtcgcggtgcctgggcccacagtcgcgccgcgctcgaccgcctggagaagctgctgcgctgctcgcgttgtactaacattctgagagagcctgtgtgtttaggaggatgtgagcacatcttctgtagatttgaaagaagataaacctaggaaaaggttggttaatgatgcaggaaacaagaagaattcaat

SEQ ID NO: 195 - DNA, 2188 bp, Homo sapiens
  CDS (539)..(958)
caattttttttttttttttttttttcttatggtaatccaaacggtatccatagcgtttacggtgtaattcaatatattcattctgtggcatggtgacggccgcagagccgccaggagcagccgctggagtgcgaaaacgctctcaattttcgggtctcaaagacccacaagcccacaccacgcaggccgggacaggaaagagtcaccctttaaaacggccgagtgaagagcaagaaccacgcagcggttccgagcctctgttttccgcttttagctaggaggacggaagttgctggcaggcggcatttggccggtacaccgccggaagtgtggaggtgtggctgcccgaggcggtagagcggagaaagcctattttcttttcgtttagatacattgccttttgcctaggctggcgtcgagacttgaggccgttgcagactttggcgcggctcgcgcctcctgcttcaagagcccagcggtgagagctggcctgcggcacgcggcctaatgccagacagtaacagtttggaggatcaagatgttgaccaacttgaggatatttgcaatgagtcatcagacaatacccagtgtgtatattaataatatatgctgctataaaataagagcaagtttaaaaagattaaagccacatgtgccgcttggaagaaattgcagttctctaccaggcttaataggaaatgatatcaaatcccttcattccatcatcaatcctcccatagctaaaatccgtaatattggaattatggctcatattgatgcaggcaaaactaccaccacagaaagaatattgtactattccggatatacaagatcactgggagatgttgatgatggagacacagtgacagatttcatggcccaagagcgagaaagaggcattactattcaatcagctgctgttacatttgattggaaaggttatagagtcaatctaatttgatacaccaggtcatgtggactttaccttggaggttgaagcggtgcctaagagtgttggatggtgcagtggctgtatttgatgcctctggctggtgtagaaggccagactctcacagtatggaggcaagctgataaacacaatatacctcgaatctgttttttaaacaagatggacaaaactggagcaagctttaagtatgcagttgaaagcatcagagagaagttaaaggcaaagcctttgcttttacagttaccaattggtgaagccaaaactttcaaaggagtggtggatgtagtaatgaaagaaaaacttctttggaattgcaattcaaatgatggaaaagactttgagagaaagcccctcttggaaatgaatgatcctgaattgctgaaggaaacaactgaagcaaggaatgccttaattgaacaagttgcagatttggatgatgaatttgctgacttggttttagaagaatttagtgagaattttgatttgttaccagctgaaaagctacagactgcaatacatagagtgacactagctcagacagcagtgcctgtgctttgtggaagtgccctgaaaaacaaagggatacagcccttgttagatgctgttactatgtacttaccttcacctgaagagcgtaactatgaatttctgcagtggtataaggatgacttatgtgcattggcatttaaagttctccatgacaagcagcgaggaccactggtttttatgcgcatttactcaggcactataaaaccccagttggccattcataatattaatggaaactgcacggagagaataagtcgtctgcttttgccgtttgctgaccaacatgtagaaatcccttcattgactgctggtaacattgctttgactgttgggcttaaacatactgccactggagacaccattgtctcatccaagtccagtgcattagctgcagctcgtagagccgaacgggagggagaaaagaagcacagacaaaacaatgaagcagagagacttttattggctggagtggagattccagaacctgttttcttctgtaccatagaacccccatcactgtctaagcagccaggtataaatggtcttagtgtgtcaactaattagtgcgctgataatttatataaaatagttgcaatataccctcaagagatttcttatgtgattgaggtaaattttatctgaatatattggtaaacattaaaaaaaaaa

SEQ ID NO: 196 - DNA, 917 bp, Homo sapiens
  CDS (174)..(335)
tgcgcgcagcggtacggaattcccaggccgagcgattacgattttgctcagattggtgagggaagagcctgcctgtggggagcggccactccatactgctgaggcctcaggactgctgctcagcttgcccgttacctgaagaggcggcggagccgggcccctgaccggtcaccatgtgggccttctcggaattgcccatgccgctgctgatcaatttgatcgtctcgctgctgggatttgtggccacagtcaccctcatcccggccttccggggccacttcattgctgcgcgcctctgtggtcaggacctcaacaaaaccagccgacagcagatgtgagcagcggcacacgggtccgggcagggggcaagggctaaggaaggagtggctagggcaggggcgggaaccggggtgcttgaccacacgtgaagactcagaactaacccaggcagcctggaactcggagaggtgatgagcagaacttactcgcattggggaaaggatgggtagggacccttgggtatatctgggactctggcagtggtgctttcctccctccgcccccctcaccacttaccagaataaaaaaccgggaatgagaagaccactttgggttactgtaacacctgcactagtgagtgaccacgccccctttcctcttccccctcgcccccttgctgctgggccacagcccagaatcccagggagtgatcagcggtgctgttttccttatcatcctcttctgcttcatccctttccccttcctgaactgctttgtgaaggagcagtgtaaggcattcccccaccatgaagtaagtgggttcgtgggggtgattgcctgtggctgggacctgggaggtacctgagagaactggggttatttgggcttgtggggaggggctaagaaattatcagaaa

SEQ ID NO: 197 - DNA, 817 bp, Homo sapiens
  CDS (104)..(601)
cgattgcgaatcctccgctgaggtgatttggatatccctagaacgttgagggcacgagtcgggtcctgagaccaggtcctcagccagcagagccacgttccttatgagcaccgtgggtttatttcattttcctacaccactgacccgaatatgcccggcgccatggggactccggctttgggagaagctgacgttgttatccccaggaatagctgtcactccggtccagatggcaggcaagaaggactaccctgcactgctttccttggatgagaatgaactcgaagagcagtttgtgaaaggacacggtccagggggccaggcaaccaacaaaaccagcaactgcgtggtgctgaagcacatcccctcaggcatcgttgtaaagtgccatcagacaagatcagttgatcagaacagaaagctagctcggaaaatcctacaagagaaagtagatgttttctacaatggtgaaaacagtcctgttcacaaagaaaaacgagaagcggcgaagaaaaaacaagaaaggaaaaaaagagcaaaggaaaccctggaaaaaaagaagctacttaaagaactgtgggagtcaagtaaaaaggtccactgagaaaagaattagagattccaactgacagaatctgccagaagctcccagggaataatggtggcgagttccatcaccagcattattatagtgcttcaaaagaaatatttttgatgaacttaaaagacaacaaatttatttaaatggtgcactaaactgtagtgaacagagacatgcacgattcaagaataaaactcggccgggcacggtggacgg

SEQ ID NO: 198 - DNA, 1056 bp, Homo sapiens
  CDS (103)..(459)
gattgcgaatcctccgctgaggtgatttggatatccctagaacgttgagggcacgagtcgggtcctgagaccaggtcctcagccagcagagccacgttccttatgagcaccgtgggtttatttcattttcctacaccactgacccgaatatgcccggcgccatggggactccggctttgggagaagctgacgttgttatccccaggaatagctgtcactccggtccagatggcaggcaagaaggactaccctgcactgctttccttggatgagaatgaactcgaagagcagtttgtgaaaggacacggtccagggggccaggcaaccaacaaaaccagcaactgcgtggtgctgaagcacatcccctcaggcattgttgtaaaggtagatcacagaaggccgctgaggggagaggccccgcccaagggttccacagcctccagagatttctcccaagtgtgaatgggatcagccgaagtgcattatttttctggcttgggccaccctctaccagccaggcagtagagagcaccgcagatctcgtcccatccctgagccgttcctccctaaggcagaacctcctacaacagcctgggaagcctgtttccaggatcttttggagccagggtatggctgccatccttgaatttggcagacagcactggtgcttggctgctgccccggaagcaacgtcttgacaaagctaagcagtggctgataaaggcaggcgcccgggcagtatggttctttcaaatctgttcccactgcaggaaggctgccgagatccccagcattgctatgggatccaagtccctgaggaggcggcaagcaggcatgggttgtctgctggcagtcccagcccttaactgtcatggctggttaacattagggtggccacatcctccacgcctctctgtcccctttggtaaatgtcggtgatacctcctcttctggacagagaggactgagggcgagatcatggaggatcatggaggccaggcattttccaacctcagaagaaaaaatgctgtgcacagctgcctataggagtcttcc

SEQ ID NO: 199 - DNA, 1168 bp, Homo sapiens
  CDS (91)..(918)
ccagcttctccagggccaagctgttgggggtgaggtgcagcccgaagcagccagaccagcccctgagcctcccgggtgctggcagctgtcatggggctaccctgggggcagcctcacctagggctgcagatgctcctcctggcgttgaactgtctccggcccagcctgagcctggagctggtgccctacacaccacagataacagcttgggacctggaagggaaggtcacagccaccaccttctccctggagcagccgcgctgtgtcttcgatgggcttgccagcgccagcgataccgtctggctcgtggtggccttcagcaatgcctccaggggcttccagaacccggagacactggctgacattccggcctccccacagctgctgaccgatggccactacatgacgctgcccctgtctccggaccagctgccctgtggcgaccccatggcgggcagcggaggcgcccccgtgctgcgggtgggccatgaccacggctgccaccagcagcccttctgcaacgcgcccctccctggccctggaccctatcgggtgaagttcctcctgatggacaccaggggctcacccagggctgagaccaagtggtcagaccccatcactctccaccaagggaagacccccggatccatcgacacctggccagggcggcgaagtggcagcatgatcgtcattacctccatcctctcttctctggccggcctcctactcttggccttcttggcagcctctaccatgcgcttctccagcctgtggtggccggaggaggccccggagcagctgcggatcggctccttcatgggcaagcgctacatgacccaccacatcccacccagcgaggccgccacactgccggtgggctgcaagcctggcctggaccccctccccagcctcagcccctagcctggcctctttgcatggggctgggggagatggggcgccgggagtgagtgcatggtgctttgtcccagctcctgcacccacaggccccctcagggctccttgcctttcccccccaccagcacaccccgtaccctgcctggaatcccagcaccagcccccctgcctctcctctgcctttctggtttctctccctctccaagcatctgtaagttgcactcaggagggtttaggggagggccatgggcag

SEQ ID NO: 200 - DNA, 796 bp, Homo sapiens
  CDS (145)..(546)
atatttatcccccccccccggtcctccgcccgcgcccgacggagcctgttcgcgtcgactgcccagagtccgcgaatcctccgctccgagcccgtccggactcccccgatcccagctttctctcctttgaaaacactaagaataatgtcactgcatcagtttttactagagccaatcacctgtcatgcctggaacagggatcgtactcagattgccctcagtcccaataatcacgaagtgcacatctataagaagaacgggagccagtgggtgaaagctcatgaactcaaggagcacaacggacacatcacaggtattgactgggctcccaagagcgaccgcattgtcacttgtggggcagaccgcaatgcctatgtctggagtcagaaagatggtgtttggaagccaaccctggtgatcctgagaattaatcgcgcagctacttttgtgaagctgagtgagcctccgccatccagcatgacaaactgtggccgaccgcagctgtgccgtggcacgatggcgaggaagccagccccaaggaaacactgaaaacacatatcacgccaatgccgtgtggttttgtttgaatataaaattggtgaaagtgttggtttttttaaggcagtaatttttttgtttgtttttttgcgatttcattccattcttgaccaaagcttctctttaagtagtttattatggaaaattgtcacactaacttaaaagacagggtgagggagatatgtaaattgtccactagaaaattaaataaaagaactgaatgtgaaaaaaaaaaaaa

SEQ ID NO: 201 - DNA, 3398 bp, Homo sapiens
  CDS (174)..(2234)
gctttaaggggcggacgggcgggaggtcggggtcctccggggattagagccggtgggctcgttgtgggcgccatttctcggcgtctcccgaggagccgcccctttctcagccttgctcggctcttccccgctctggtcgccggggctgcgccgtccccagctcagtgacaaaaatgctgagtttcttccgtagaacactagggcgtcggtctatgcgtaaacatgcagagaaggaacgactccgagaagcacaacgcgccgccacacatattcctgcagctggagattctaagtccatcatcacgtgtcgggtgtcccttctggatggtactgatgttagtgtggacttgccaaaaaaagccaaaggacaagagttgtttgatcagattatgtaccacctggacctgattgaaagcgactattttggtctgagatttatggattcagcacaagtagcacattggttggatggtacaaaaagcatcaaaaagcaagtaaaaattggttcaccctattgtctgcatcttcgagttaagttttattcctcagaaccaaataaccttcgtgaggagctaacccggtatttatttgttcttcagttaaaacaagatattctcagtggaaaattagactgtccctttgatacagcagtgcaattggcagcttataatctgcaagctgaacttggtgactatgatcttgctgagcatagtcctgaacttgtctcagagttcagattcgtgcctattcagactgaagagatggaactggctatttttgagaaatggaaggaatacagaggtcaaacaccagcacaggctgaaaccaattatctgaataaagccaaatggctagaaatgtatggggttgatatgcatgtggtcaaggctagagatgggaatgactatagtttgggactaacaccaacaggagtccttgtttttgaaggagataccaaaattggcttatttttttggccgaagataaccagattggattttaagaagaataaattaaccttggtggttgtagaagatgatgatcagggcaaagaacaggaacatacatttgtctttagactggatcatccaaaagcatgcaaacatttatggaaatgtgctgtggagcatcatgctttcttccgccttcgaggccccgtccaaaagagttctcatcgatcaggatttattcgactaggatcacgatttagatatagtgggaaaacagagtatcagaccacaaaaaccaataaagcaagaagatcaacatcctttgaaagaaggcccagcaaacgatattctagacgaactctacaaatgaaagcatgtgctacaaaacctgaagaacttagtgttcacaataatgtttcgacccaaagtaatggctcccaacaggcttgggggatgagatctgctctgcctgtgagtccttccatttcctctgctcctgtgccagtggagatagagaatcttccacagagtcctggaacagaccagcatgacaggaaatgcattcctctgaatattgatttgctgaatagcccagacttattggaaacaacgattggtgatgtaattggggcatctgacactatggaaacatcccaagcactgaatgacgttaatgtagccaccaggcttccgggattaggggaacctgaagttgaatatgagacattaaaagacacctcagagaagctcaaacagcttgagatggagaacagtcctttgctgtcccctcgatccaacatcgatgttaacataaacagccaggaggaagtggtgaagttgactgagaaatgccttaataatgtcattgagagcccaggattgaatgtcatgagagttcctcctgacttcaagagtaacattttgaaggctcaagtagaagcagtgcataaggttacaaaagaagatagcttattaagtcataaaaatgccaatgttcaggatgctgccacaaacagtgctgtgttaaatgagaataatgtgcccctccccaaagagtctcttgagactctgatgcttatcacacctgccgacagtggttctgttctaaaggaagctacagatgaattggatgccttgcttgcatctctaactgagaatctaattgatcacacagttgcacctcaggtgtcttccacatccatgatcacaccccggtggattgttccgctctggtcccattttggcagaagaagctgtcctgaagcagaagtgtttactgaccactgagctctgagggcctgtagctggaatacgcatctctccagcattccgtcctgggatccgtttcagctagaatatgttggattcaggagcttgtccattatttgtaggtaaaaaaagctgcacgtagatttgacttcaactccgtaaaaaagacagctgtattttccgtccaactggaattgttgaatcacactgcatagctgcccaaaagagagtgtttggtcttgaactttctatacttttataaatgttacaaattcccgaaagaagggaatttctttttctggggtttccttcaaactcttggctccacctagcggttctatttgttcataacaacttcataacaagcctgcctctggtagtcaacagccttttgaaagctatttccatctagtatcagggtgagagcatccttgatctggctgcctgttagagaaattgcacttttcctgacttacctagaaatccaagaatttaggaaattaatgtggacactataaaggcagacttagggccaactttttttttttttacaattattacaacactaaagagaagtttagaatatagagagtttttaaatgtctcccattcttttgatttcttactgtactggctatcttaatatttcaagtttacatcaagataaaccctgagaagaactacggagaaatcaaataaaatcctgtcatatttttttcaccctgcctttccacaggaagcactcacaggcaccacacacgtatcatgtaacttatcagtggggtgggttactgttgaagagaccctggggcatttacctcaggcatctgcactcctccgagcccggtggagaatgcaggctgctgtagtctcaggtaatgaaggcacagcacagcagtactccacattgtttcctatttggacatagacttcatttcctttcagtataagctgaataaatttagagctttcaaactggaaaaaaaaatgaaacaaaacaaatacaccaagaccaaaataggcaataggaacaggggtgaagggatgttggtccttaaatacctaccatgtatgaagctatacacagcatataccgaaagaacctgcattgcactaggaattctgtgttagtttaaaagagatctctaaaacttccccatccctttgggcctgtacaaa

SEQ ID NO: 202 - DNA, 752 bp, Homo sapiens
  CDS (105)..(530)
aggacccaggagtctgggtgcacagcctccttctctctgagattcaagagtctgatcagcagcctcttcctcctccaggacccagaagccctgagcttatccccatggagctctgccggtccctggccctgctggggggctccctgggcctgatgttctgcctgattgctttgagcaccgatttctggtttgaggctgtgggtcccacccactcagctcactcgggcctctggccaacagggcatggggacatcatatcaggccacggcccgcttgtctcaaccaccgcagcctttgctgcaggtaaggactctggactggactggggcatcgcgagccagcgaattcctgccgaggagctgagccatctctcttgtccttgtccccagccatctccatggtggtggccatggcggtgtacaccagcgagcggtgggaccagcctccacacccccagatccagaccttcttctcctggtccttctacctgggctgggtctcagctatcctcttgctctgtacaggtgccctgagcctgggtgctcactgtggcggtccccgtcctggctatgaaaccttgtgagcagaaggcaagagcggcaagatgagttttgagcgttgtattccaaaggcctcatctggagcctcgggaaagtctggtcctacatctgcccgcccttccagcccttccccagcccctcaacttgtttcttcattcattcaacaaaatttaactggaaaaaaaaaaaaaa

SEQ ID NO: 203 - DNA, 1183 bp, Homo sapiens
  CDS (136)..(645)
tcatttagttgtccaaaggccagtgggtcccagagcatataaagctgcaagctggctaatgagctcattctcttggagcaagcagggaagcagaggagcagcagggtcagggtgctgggttcctaaggtgcaaggatgcagaacagaactggcctcattctctgtgctcttgccctcctgatgggtttcctgatggtctgcctgggggccttcttcatttcctggggctccatattcgactgtcaggggagcctgattgcggcctatttgcttctgcctctggggtttgtgatccttctgagtggaattttctggagcaactatcgccaggtgactgaaagcaaaggagtgttgaggcacatgctccgacaacaccttgctcatggggccctgcccgtggccacagtagacaggccagacttttaccctccagcttatgaagagagccttgaggtggaaaagcagagctgtcctgcagagagagaggcctctggcattcctccacctctatatacagagacgggcctggaattccaggatggaaatgactcccacccagaggccccaccatcttatagagagtccatagccggcctggtggtgacagcaatctcagaggacgcccagaggcgaggccaagagtgctgaggcagagaaagctctccagcactcatgatgccaccactgtggggagcagctactgataataaaggcaaacgagggactgtgggaggaaaagccacaccagtgaccccacaagagagcttggggaggggatgacagccctgaattccagacgtaactggccatgccagggcagggcaggccaaggggccctggaagggtgtggccaacaccaagcagacatttcagaggattcacactaatcttaaccccggctggccttgggtccccaaaggtgtcactctgagagctctgcttacagagattctttctgctgtcactcaatttccctcccatcacctcaactccagccagggaggaatagatgctggttgtcaggacagccacatgccttcctgttctatatcacctagtaatctcaaagcgaaggtttgttgtttaatttattgattgttcagccttttgttttgctagcttgtttcctatttacctccagctgaccatactaccagagtgaggcagtacttcacatcctgcg

SEQ ID NO: 204 - DNA, 1154 bp, Homo sapiens
  CDS (409)..(768)
gatgacggtaattacctgaaaccacctctgagggaaggtggtggcgtctcaaatgcatgggcatgtggctggtcaggtggcctccatcccagggtgccccgtctgtgtgacctccctctgggtgctgtgggcttgctccagggtgcaggtgcaaccccagcagcggtctctggggccaggcaggtgggtggacgattggacttggaggggaatacagagggcatggaagtggcgaggctggcctgttggcgagggtgtcctggtggtggggcgggctgagtcagggaaggactctgaaggtcccaagcagctgctgaggcccccaaggaagtggttccaaccttggacccctaggggtctggatttgctggttaacaagataacctgagggcaggaccccataggggaatgctacctcctgcccttccacctgccctggtgttcacggtggcctggtccctccttgccgagagagtgtcctgggtcagggacgcagaggacgctcacagactccagccctttgttaccgagaggacacttggcaaggtccagcgatggtccggagtccacacacagactggcggcagggcaggagggggacagttctgttgtgcttggttggacagtaagagggtcttggccagtccagggtggggggcggcaaactccataaagaaccagagggtctgggccccggccacagagtcatctgcccagctcctctgctgctggccagtgggagtggcacgaggtggggctttgtgccagtaaaaccacaggctggatttgcctgcgggccatggtccctgtctagggcagcaattctcaaccttcttgctctcaggaccccaaagagctttcattgtatctattgatttttaccacattacctgataccaaaaggttagacacacgttacaagaaaagaaaactacagataagtattctcttgaacacaggtacaaaaatgctaaatagaatttttgcaaattaaattcaatgctatataaaaacaaaacatgatctagtgggatttatttcagggatgcaaacctgtttaaggattgaaaaatcaatggatgcctcttcagattattaaagaattatttttaaagagagaaaagtccatgtaatttaccatattaaaaaaaaaa

SEQ ID NO: 205 - DNA, 1584 bp, Homo sapiens
  CDS (51)..(1166)
tttcgtggcagcatccaggcgctggtcgccttcggggtgcgggggaggacatgctgctgctgaagaaacacacggaggacatcagcagcgtctacgagatccgcgagaggctcggctcggggccctccccgctccactctctctccctcctgcctctcctctcttcccacttccttcccacctcccaccgccccgtctgcggcaggggtgccttctccgaggtggtgctggcccaggagcggggctccgcacacctcgtggccctcaagtgcatccccaagaaggccctccggggcaaggaggccctggtggagaacgagatcgcagtgctccgtaggatcagtcaccccaacatcgtcgctctggaggatgtccacgagagcccttcccacctctacctggccatggaactggtgacgggtggcgagctgtttgaccgcatcatggagcgcggctcctacacagagaaggatgccagccatctggtgggtcaggtccttggcgccgtctcctacctgcacagcctggggatcgtgcaccgggacctcaagcccgaaaacctcctgtatgccacgccctttgaggactcgaagatcatggtctctgactttggactctccaaaatccaggctgggaacatgctaggcaccgcctgtgggacccctggatatgtggccccagagctcttggagcagaaaccctacgggaaggccgtagatgtgtgggccctgggcgtcatctcctacatcctgctgtgtgggtacccccccttctacgacgagagcgaccctgagctcttcagccagatcctgagggccagctatgagtttgactctcctttctgggatgacatctcagaatcagccaaagacttcatccggcaccttctggagcgagacccccagaagaggttcacctgccaacaggccttgcggcacctttggatctctggggacacagccttcgacagggacatcttaggctctgtcagtgagcagatccggaagaactttgctcggacacactggaagcgagccttcaatgccacctcgttcctgcgccacatccggaagctggggcagatcccagagggcgagggggcctctgagcagggcatggcccgccacagccactcaggcctccgtgctggccagccccccaagtggtgatgcccaggcagatgccgaggccaagtggactgacccccagatttccttcccttggatgctttcggtcccctcccccaacccctccccctggggctggcctctgctggattttgagatttgagggtgtggcgcatggcgctggggttggaatggggcacccccaagtctgtccccaggctctgccctgcctgggggcagtggctcccctcccctgttgcctctcccgcccctgccccccccgccccgccaaaagccgagggggtgctggcaggcgggcctcaggggctgtctttcctgcacggctgttgtgtgcttcgctgagtgtgggtggtcctgcttgtgtcatggtcatggccttccagccccctccagttttccccaaaccaataaagaaagatacagcaaaaaaaaaaaa

SEQ ID NO: 206 - DNA, 768 bp, Homo sapiens
  CDS (362)..(694)
tcaggacagcccagtgttagaatagagtggcggaggtaccaagaaaggattcctgctatccagaaataattccactattctattccagctttctgcttcctgtaacaccagatttcagccttcttcccaagataattttacaagccttctccttatctttggtgagctcctttctgctcatatttctgggcaagaagattgccagtcttcacaattacagtgtcaattccaaccaggatttaatagccatcggcctttgcaatgtcgtcagttcatttttcagatcttgtgtgtttactggtgctattgctaggactattatccaggataaatctggaggaagacaacaggcgcaggtgtgatgctgctcctgatggtgaagatgggacactttttctacacactgccaaatgctgtgctggctggtattattctgagcaacgtcattccctaccttgaaaccatttctaacctacccagcctgtggaggcaggaccaatatgactgtgctctttggatgatgacattctcatcttcaattttcctgggactggacattggactaattatctcagtagtttctgctttcttcatcaccactgttcagctaagattcttctcctgggtcaaatccctaacaccaacatttatagaagcatcaatgattatcgggagatcatcaccattcctggggtgaaaatcttccagtgctgcagctcaattacatttgtaaatgtttactacctaaagcataagctgttaaaagag

SEQ ID NO: 207 - DNA, 1260 bp, Homo sapiens
  CDS (8)..(766)
ggggaccatggaggccgcaaggcccttcgcccgggagtggagggcccagtccctacccctggcagtagggggcgttttgaagctgcggctctgtgagctgtggctactgctactgggttctaatttgaacgccatatttttgccagacgaggaggacgtaaactttatcaacgagtacgtgaacctccacaatgagctgcggggcgacgtcattccccgagggtctaacttgcgcttcatgacttgggatgtagctttatcacggactgctagagcatggggaaaaaaatgtttgtttacgcataatatttatttacaagatgtacaaatggtccatcctaaattttatggtattggtgaaaatatgtgggtcggccctgaaaatgaatttactgcaagtattgctatcagaagttggcatgcagagaagaaaatgtacaattttgaaaatggcagttgctctggagactgttctaattatattcagcttgtttgggaccactcttacaaagttggttgtgctgttactccatgttcaaaaattggacatattatacatgcagcaattttcatatgcaactatgcgccaggaggaacactgacgagaagaccttatgaaccaggaatattttgtactcgatgtggcagacgtgacaaatgcacagattttctatgcagtaagataaagaaaataaacatgaaaaaaatgcataatggattggacaagaaaaataagcgattgaacactagttttttatggtcatgttaatattattcctttgatcagaatgctactattatgttatcaaaggatggttgacacagtatcatctttagatttttctaaactgcagagctttttctgttctatcttaaccctattccttcccctgaggacataccagagtgtcagaaagaaagaatgagaactaacagttatacccttaaaaagcttcacagtttatgcccaaacagcagcctgtttgataataactgctttaaaggatagtatattccaaaatatttatgaagtagcatatatttaatacccttttcttttagtttttcctccaaaaagctgaaatctccaaatatttcaaaagtaaaaagtagaaaatatgtttgattacatttttcttttagtttttccaaacatgagagaatatactccaaaagtataactgtagctaaaatatacaatgcttagaggaatatggtaggagataaatttggataataagtaaatagcatattatgttg

SEQ ID NO: 208 - DNA, 638 bp, Homo sapiens
  CDS (203)..(496)
gctgcagttttcctcagcttgggtggtggccgctgccggggcatcggcttccagtccgcggagggcgaggcggcgtggacagcggccccggcacccagcgccccgccgcccgcaagccgcgcgcccgtccgccgcgccccgagcccgccgcttcctatctcagcgccctgccgccgccgccgcggcccagcgagcggccctgatgcaggccatcaagtgtgtggtggtgggagacggagctgtaggtaaaacttgcctactgatcagttacacaaccaatgcatttcctggagaatatatccctactgtctttgacaattattctgccaatgttatggtagatggaaaaccggtgaatctgggcttatgggatacagctggacaagaagattatgacagattacgccccctatcctatccgcaaacagatgtgttcttaatttgcttttcccttgtgagtcctgcatcatttgaaaatgtccgtgcaaaggtgctgtaaaatacctggagtgctcggcgcctcccgtgaagaagaggaagagaaaatgcctgctgttgtaaatgtctcagcccctcgttcttggtcctgtcccttggaacctttgtacgctttgctcaaaaaaaaacaaaaaaaaaaa

SEQ ID NO: 209 - DNA, 1261 bp, Homo sapiens
  CDS (109)..(996)
atgaggtgaactgcattaacctaaagtgctgcagagataaacttaaagcaggaagcaacataccatgaatgtactgcaagggaacacatttgtgtcatgtgaagagacatgacaaaaacagccctccttaaattatttgtggcaatagtgatcacattcattttaattttgccggaatatttcaagacaccgaaagaaagaacattggagctatcatgtctggaagtgtgtttgcaatctaattttacctattcactctcctccttaaatttttcttttgtgacttttctgcaaccagtaagggaaactcagattatcatgagaatctttctaaatccctccaattttcgtaacttcaccaggacttgccaagacatcacaggtgaatttaaaatgtgctcctcgtgtttggtttgtgagtctaaaggaaacatggattttatttctcaggaacaaacatcaaaagttcttatcaggagaggatcaatggaagtgaaagcaaatgattttcattcaccttgtcagcactttaacttcagtgtagctcctctggttgaccacttggaggaatataacactacctgtcatctaaaaaaccacactggaagatcaacaatcatggaggatgagccaagcaaggagaaatcgataaactacacttgtagaatcatggaatacccgaatgattgtatacacatttctttgcacctggagatggatataaaaaatatcacttgttccatgaagatcacttggtatattttagttctattagtttttatatttttgatcatcctcactatccgcaaaatacttgaaggccagagaagagtgcaaaagtggcagagtcatagagacaaacctacatctgttctcttaagaggaagtgattcggagaaactgagagcattgaatgtgcaggttctttcagcagagaccacgcagaggctgcctttggatcaagtccaggaagtgcttcccccaattccagaactataagttacttccacagtgcatcagtgagatcaatatacacgaatatccccgggcaagttggaccgagccctttgaagaatactcagaagtttattttgtgaatgagtagactggaaaatgtttgtgtccagctgaggatgcacagttggaaagcaggaggaatgctgactggttgatgaaaactagcttaagagcattcattcgctccatgagatcaagggaacaagagtgtttgcaagaagccattatgagtcatggaaaaaaa

SEQ ID NO: 210 - DNA, 1177 bp, Homo sapiens
  CDS (109)..(912)
atgaggtgaactgcattaacctaaagtgctgcagagataaacttaaagcaggaagcaacataccatgaatgtactgcaagggaacacatttgtgtcatgtgaagagacatgacaaaaacagccctccttaaattatttgtggcaatagtgatcacattcattttaattttgccggaatatttcaagacaccgaaagaaagaacattggagctatcatgtctggaagtgtgtttgcaatctaattttacctattcactctcctccttaaatttttcttttgtgacttttctgcaaccagtaagggaaactcagattatcatgagaatctttctaaatccctccaattttcgtaacttcaccaggacttgccaagacatcacagttcttatcaggagaggatcaatggaagtgaaagcaaatgattttcattcaccttgtcagcactttaacttcagtgtagctcctctggttgaccacttggaggaatataacactacctgtcatctaaaaaaccacactggaagatcaacaatcatggaggatgagccaagcaaggagaaatcgataaactacacttgtagaatcatggaatacccgaatgattgtatacacatttctttgcacctggagatggatataaaaaatatcacttgttccatgaagatcacttggtatattttagttctattagtttttatatttttgatcatcctcactatccgcaaaatacttgaaggccagagaagagtgcaaaagtggcagagtcatagagacaaacctacatctgttctcttaagaggaagtgattcggagaaactgagagcattgaatgtgcaggttctttcagcagagaccacgcagaggctgcctttggatcaagtccaggaagtgcttcccccaattccagaactataagttacttccacagtgcatcagtgagatcaatatacacgaatatccccgggcaagttggaccgagccctttgaagaatactcagaagtttattttgtgaatgagtagactggaaaatgtttgtgtccagctgaggatgcacagttggaaagcaggaggaatgctgactggttgatgaaaactagcttaagagcattcattcgctccatgagatcaagggaacaagagtgtttgcaagaagccattatgagtcatggaaaaaaa

SEQ ID NO: 211 - DNA, 2385 bp, Homo sapiens
  CDS (94)..(1506)
tgtcggctcggttcggtcgcgttacagggcaggcgccggggccaaggcagggagggatcttaggagagatcgtaggacatctgaagagctgccatgtctggggcatcttcctcagaacagaacaacaacagctatgaaaccaaaaccccaaatcttcgaatgtcagagaagaaatgttcatgggcctcctacatgaccaactccccgactctgatcgttatgattggtttgccagcccggggtaaaacctacgtgtccaagaaactaacacgctacctcaactggattggagtccccaccaaagtgtttaatcttggggtgtatcggcgtgaagcagtcaagtcctataagtcctacgacttctttcggcatgacaatgaggaggccatgaagatccgcaaacagtgtgctctggtggcgctggaagatgttaaggcgtatctcactgaggagaatggtcagattgcggtgtttgatgccaccaatacaacccgggagaggagggacatgattttgaactttgctgaacagaattccttcaaggtattctttgtggaatccgtctgtgatgatcctgatgtcattgctgccaatattctggaggttaaggtatcaagccctgactatcctgaaaggaacagagagaacgtgatggaggacttcctgaagagaattgaatgctacaaagttacctaccgacctcttgacccagacaactatgacaaggatctttctttcatcaaggtgataaacgtgggccagcgatttttagtcaacagagtccaggactacatccagagcaagatagtctactacctcatgaatatccacgtccagcctcgcaccatttacctttgccggcatggagaaagcgagttcaatctcttggggaagattgggggtgactctggcctctcggtgcggggaaagcagtttgcccaagctctaaggaaatttctggaggaacaggaaataacagacctcaaagtgtggacaagccagttgaagaggaccatacagactgctgaatctctcggggtgccctatgagcagtggaagattctgaatgagattgatgctggtgtgtgtgaagagatgacctatgcagagattgagaaacggtacccagaagagtttgcacttcgagatcaagagaagtatctgtatcgatatcctggtggggagtcataccaggacctggtgcagcggctggagcctgtcatcatggagctggaacgtcagggcaatgtcctcgtcatctcccaccaggctgtcatgcgctgcctcctggcctacttcttggataagggcgcagatgagctaccatacttgagatgccctctccataccatcttcaaacttactcctgtggcctatgggtgcaaagtggaaacaattaaacttaacgtggaggctgtgaacacgcaccgtgacaagccaactgcagcagagaccacactggctgtgcgcagacgcccctccgcagcgtccctcatgttgccttgctaatgatgtggatgttcaggcctcacctctccaaacgactgggatctactgaaaagcttgggatgtcagcttcacagaggctagaacaggaagttaagtgggaactggactttgggggccaccaaaacgaggcctggagaaacgtcaccatatttcctcccctcctgcctaatgggaatatcagttacactgaaaaatttaacttccctgtgcctcaaaacatttagcaacctgaaccagtgactttttgtcatctctgtgctgagtttggtccaagttggtcaatctcattctgtataggcatttaacatcctacctgtgactgtctgcatcctttgctggctcttttttgcccaaagtgcaaatgcacttcttcagatttacttttcaagtgagaaggtaagagctggtctctgccactgttccaggcgagcaggctagagtctaatatacttatgctagcagttaccatttgccacattggaagcaagagacaaatcaccaggtgaatggagggtcttctgagaaattcagtccctaaaacatcttctctgccttgatagaagaacagtgtcagtggcaaccttttcatttagagaagtttttcttgtcccaggcccttcaggacaggatctgactgcaagactccccaaaatgggtacccatcttttaaggtcccttttgtagctactgtacttttgacttgatgcatgtgcctctcatgcattaagatggggctgatgtggttctctctggtgggttttgaatgtgtactataccgaaatgtatagggccttttatttctcggggtatgtatagaaagctccttttttaaacagcccgatcagggagtgttttggcttatatctgtagtaaatg

SEQ ID NO: 212 - DNA, 2546 bp, Homo sapiens
  CDS (112)..(1854)
aaaaaaacaaaaaacaaaagaaagtgtaatgcatgaagtgaaatgaaaaatagatgctgggaaggatgtctaactgggagatagcttgtgatgtaaatatgtaaatatattatgaatgaccagtgggcaaggcaaaattgcctacacagccctacctatggcccctctgaaaatgttctttcttcagcagaatcgaagccagaaattcaacttagtccctcctgccctctgattttctccagtcagcaagctctcagccaacatgtgtggctgagtcatctctctcagctgttttcaagtttatgggcaggaaatcctctccacctgggaaaacactatccagaagatcagaaacaacagcaggatccattctgctttagtggcaaagcagaatggattcaagagggagaagactccagactcctgtttgggagagtaagcaaaaatggcacttcaaaggcactttccagcccacctgaagaacaacagccagcacagtccaaggaagacaacacagtggtggatatagggtccagccctgaacggagggcagatctagaggaaacagacaaagtattgcatggtttagaagtctcaggatttggagaaatcaaatatgaagagtttgggccaggctttatcaaggagtcaaacctccttagcctccagaagacacaaactggggagacaccttacatgtacactgagtggggagacagctttggcagtatgtcagtcctcatcaaaaacccaaggacacactctgggggaaagccttatgtgtgcagggaatgtgggcgaggctttacgtggaagtcaaacctgatcacacatcagaggacacactcaggggagaaaccttatgtgtgcaaggattgtggacgaggctttacttggaagtcgaacctctttacacatcagcggacacactcagggctcaagccttatgtgtgcaaggaatgtgggcagagctttagcctgaagtcaaacctcattacccaccagagggcgcacactggggagaagccttatgtttgcagggaatgtgggcgtggctttcgccagcattcacacctggtcagacacaagaggacacattcaggagagaagccttacatttgcagggagtgtgagcaaggctttagccagaagtcacacctcatcagacacttaaggacacacacaggagagaagccttatgtatgcacagaatgtgggcgtcactttagctggaaatcaaacctcaaaacacaccagaggacacactcaggggttaaaccttatgtctgcctggagtgcgggcagtgctttagcctgaagtcaaaccttaacaaacaccagaggtcacacacgggggagaagccatttgtatgtacggagtgtgggcgaggctttacccggaaatcaaccctgagcacgcaccagaggacacactcaggggagaagccatttgtatgtgctgagtgtggacgaggctttaatgataagtccaccctcatttcacaccagaggacacattcaggggaaaagccttttatgtgcagggagtgtggcagaaggtttcggcagaagcctaacctgtttaggcacaagagggcacactcaggtgcctttgtgtgcagggagtgtgggcaaggcttttgtgctaagttaactctcattaaacaccagagagcacacgcaggggggaagcctcatgtgtgcagggagtgtgggcaaggctttagccggcagtcacacctcattagacaccagaggacacattcaggagagaagccttatatttgcagaaagtgtggacggggctttagtcggaagtccaaccttatcagacatcagaggacacactcaggatagaaactttatgtgtatagggaatgtggtacagcctttagccaggagtcatacttcatcagacaccagaggacacacacagtgctgtggctttttcagccattgctagataccaaagtggagacattctgtgtgtgattatgcatgagactgtactggtaagacttgtatctccatccacctgaaggagaattgctggctcattttcaggagccctgcccttcctcactgtggatggtgggttgtggaaacccggtcaggtaatgatagtggcaggaggcagtcaaatgcccaggcagataggggtgggtacctggtgaaacccaaccttaaagctgaagacagtcccggctaaatcctcatactgaattgagaacctgtcttcccatttggtgtgctttcctccgattgatcccaacccttcacctattttacgtatacctgccctttcctaattggtttttacactgctgtgcccaccttttgagtggtgcctttgcatacttacaaatcagtcaacgtgtattcccctattttgagcccataaaagacccagactcagctgcagtgaggagagaaatcaccctgctgtgggggttggggaccactccctgcatcccctctccactgagagctgttcttttgctcaataaaattcttttctacccatcctcacccttcaaaaaaaaaaa

SEQ ID NO: 213 - DNA, 1607 bp, Homo sapiens
  CDS (136)..(1065)
ttctccgattaacgtctgagattcacaggactgtctagctctgagtcctagcaatagactccttagaggagtagtacgtttatctagattttctctagataatgcaggcggaagacctgggttcccgggtggggcatgcagttcttcctgtgtttggcttccaggaattacatgaacgacagccttcgcaccgacgtcttcgtgcggttccagccagagagcatcgcctgtgcctgcatttatcttgctgcccggacgctggagatccctttgcccaatcgtccccattggtttcttttgtttggagcaactgaagaagaaattcaggaaatctgcttaaagatcttgcagctttatgctcggaaaaaggttgatctcacacacctggagggtgaagtggaaaaaagaaagcacgctatcgaagaggcaaaggcccaagcccggggcctgttgcctgggggcacacaggtgctggatggtacctcggggttctctcctgcccccaagctggtggaatcccccaaagaaggtaaagggagcaagccttccccactgtctgtgaagaacaccaagaggaggctggagggcgccaagaaagccaaggcggacagccccgtgaacggcttgccaaaggggcgagagagtcggagtcggagccggagccgtgagcagagctactcgaggtccccatcccgatcagcgtctcctaagaggaggaaaagtgacagcggctccacatctggtgggtccaagtcgcagagccgctcccggagcaggagtgactccccaccgagacaggccccccgcagcgctccctacaaaggctctgagattcggggctcccggaagtccaaggactgcaagtacccccagaagccacacaagtctcggagccggagttcttcccgttctcgaagcaggtcacgggagcgggcggataatccgggaaaatacaagaagaaaagtcattactacagagatcagcgacgagagcgctcgaggtcgtatgaacgcacaggccgtcgctatgagcgggaccaccctgggcacagcaggcatcggaggtgaggcggggttgcagtgactggtggccgcaagcccttccctggggagtacctgatggctgccctttgacccccggtggctgccctttgacccccgggtgtgctctcagcgcaagtggtcctagaacaggattctttttggaaatgtctgtcgactggaccttggtggatttggaaatggaactgagggaccggtgacacgtgcttcagaccggtctggggtgcggcgcacacctgggcccgtgcagggctcagctcggcagcagctctgagggcagctcaatgaaaaagtgaatgcacacgcccttgttggcgtggcctggcatggcctggtgctatcggcagccgctctccactccccgactgatactcaattacgtgaagccaagaaagatgatttttagaacctttgcctatattaggttgtacttatgtacatattttgcagtgtttcacaggagaaagtggccttaactgccccttattctctctccacgttgtaaataaacatgtgtttaatacaagttaaagctaaaaaaaaaa

SEQ ID NO: 214 - DNA, 2480 bp, Homo sapiens
  CDS (626)..(2113)
ggcccgcagggggtagcagagccgagcccaccccgccctctcccgcccgggtccgcgcaccgttccgctgcagaaagcgcaggccatcccggtatccctgcttgcacatctctcgcagcaccaggggctccggcgggaagagggccttggagaggcggtagaggttgcgcaggttgaactggatgctggtgttggtgacccgcagctcgtggatgttggtggagctgtcctgcggacagatgtcactctcgcccgagaagggggacactgtgatggtgttcttaagctcatagagtggcaggttgtctgaaatgccaccatccacgtagcgcttccacgggacacacagacaggaccgtatgtgagggcctgtggctgcactggccacccaccccagccaccccacccggccaccaagggccccattcagtggctacctcatttgagcgttttacccactgggcactggctgtgggccagcctgggcactgagcagatggtagacgggggagggcagggacggaggaagggatggggggccaggaagcgtgcgttgccacagctgtttcttgagtaacacagggggaagtgggtaacaggcggtggcagagcaagggcctgaaggatggctctaggcggcctcctcctctgtccctcatcccacggcccaccccatagaaggtgtccagggctaggaatactcaccaccccctggagggagggagggatgagcccacagtacacggggatgaaaccgctgcagacattggcctggatgagctcgtccttggagttgaagtgggatataatgacattctcgccgtctgacacgcgggtcagggagatgcccaggcgcccctccttcaacctggtaaagatcatccgcagtttcctgctgaaggtcgtgcctgctgatagccatgagcatgccagtgggcgcctgggcatctccctgacccgcgtgtcagacggcgagaatgtcattatatcccacttcaactccaaggacgagctcatccaggccaatgtctgcagcggtttcatccccgtgtactgtgggctcatccctccctccctccagggggtgcgctacgtggatggtggcatttcagacaacctgccactctatgagcttaagaacaccatcacagtgtcccccttctcgggcgagagtgacatctgtccgcaggacagctccaccaacatccacgagctgcgggtcaccaacaccagcatccagttcaacctgcgcaacctctaccgcctctccaaggccctcttcccgccggagcccctggtgctgcgagagatgtgcaagcagggataccgggatggcctgcgctttctgcagcggaacggcctcctgaaccggcccaaccccttgctggcgttgccccccgcccgcccccacggcccagaggacaaggaccaggcagtggagagcgcccaagcggaggattactcgcagctgcccggagaagatcacatcctggagcacctgcccgcccggctcaatgaggccctgctggaggcctgcgtggagcccacggacctgctgaccaccctctccaacatgctgcctgtgcgtctggccacggccatgatggtgccctacacgctgccgctggagagcgctctgtccttcaccatccgcttgctggagtggctgcccgacgttcccgaggacatccggtggatgaaggagcagacgtgcagcatctgccagtacctggtaatgcgcgccaagaggaagctgggcaggcacctgccctccaggctgccggagcaggtggagctgcgccgcgtccagtcgctgccgtccgtgccgctgtcctgcgccgcctacagagaggcactgcccggctggatgcgcaacaacctctcgctgggggacgcgctggccaagtgggaggagtgccagcgccagctgctgctcggcctcttctgcaccaacgtggccttcccgcccgaagctctgcgcatgcgcgcacccgccgacccggctcccgcccccgcggacccagcatccccgcagcaccagccggccgggcctgcccccttgctgagcacccctgctcccgaggcccggcccgtgatcggggccctggggctgtgagaccccgaccctctcgaggaaccctgcctgagacgcctccattaccactgcgcagtgagatgaggggactcacagttgccaagaggggtctttgccgtgggccccctcgccagccactcaccagctgcactgagaggggaggtttccacacccctcccctgggccgctgaggccccgcgcacctgtgccttaatcttccctcccctgtgctgcccgagcacctcccccgcccctttactcctgggaactttgcagctgcccttccctccccgtttttcatggcctgctgaaatatgtgtgtgaagaattatttattttcgccaaagcacatgtaataaatgctgcagcccaaaaaaaaaaaaaa

SEQ ID NO: 215 - DNA, 2501 bp, Homo sapiens
  CDS (106)..(1989)
tttcgtgtggctccccgtcctggtgcgggacctgtgccccgcgcttcatccctccccgcacagcctattgattcccctgccgcccttgctcacctcctgctcgccatggagtcgctggttttcgcgcggcgctccggccccactccctcggccgcagagctagcccggccgctggcggaagggctgatcaagtcgcccaagcccctaatgaagaagcaggcggtgaagcggcaccaccacaagcacaacctgcggcaccgctacgagttcctggagaccctgggcaaaggcacctacgggaaggtgaagaaggcgcgggagagctcggggcgcctggtggccatcaagtcaatccggaaggacaaaatcaaagatgagcaagatctgatgcacatacggagggagattgagatcatgtcatcactcaaccaccctcacatcattgccatccatgaagtgtttgagaacagcagcaagatcgtgatcgtcatggagtatgccagccggggcgacctttatgactacatcagcgagcggcagcagctcagtgagcgcgaagctaggcatttcttccggcagatcgtctctgccgtgcactattgccatcagaacagagttgtccaccgagatctcaagctggagaacatcctcttggatgccaatgggaatatcaagattgctgacttcggtctctccaacctctaccatcaaggcaagttcctgcagacattctgtgggagccccctctatgcctcgccagagattgtcaatgggaagccctacacaggcccagaggtggacagctggtccctgggtgttctcctctacatcctggtgcatggcaccatgccctttgatgggcatgaccataagatcctagtgaaacagatcagcaacggggcctaccgggagccacctaaaccctctgatgcctgtggcctgatccggtggctgttgatggtgaaccccacccgccgggccaccctggaggatgtggccagtcactggtgggtcaactggggctacgccacccgagtgggagagcaggaggctccgcatgagggtgggcaccctggcagtgactctgcccgcgcctccatggctgactggctccggcgttcctcccgccccctcctggagaatggggccaaggtgtgcagcttcttcaagcagcatgcacctggtgggggaagcaccacccctggcctggagcgccagcattcgctcaagaagtcccgcaaggagaatgacatggcccagtctctccacagtgacacggctgatgacactgcccatcgccctggcaagagcaacctcaagctgccaaagggcattctcaagaagaaggtgtcagcctctgcagaaggggtacaggaggaccctccggagctcagcccaatccctgcgagcccagggcaggctgcccccctgctccccaagaagggcattctcaagaagccccgacagcgcgagtctggctactactcctctcccgagcccagtgaatctggggagctcttggacgcaggcgacgtgtttgtgagtggggatcccaaggagcagaagcctccgcaagcttcagggctgctcctccatcgcaaaggcatcctcaaactcaatggcaagttctcccagacagccttggagctcgcggcccccaccaccttcggctccctggatgaactcgccccacctcgccccctggcccgggccagccgaccctcaggggctgtgagcgaggacagcatcctgtcctctgagtcctttgaccagctggacttgcctgaacggctcccagagcccccactgcggggctgtgtgtctgtggacaacctcacggggcttgaggagcccccctcagagggccctggaagctgcctgaggcgctggcggcaggatcctttgggggacagctgcttttccctgacagactgccaggaggtgacagcgacctaccgacaggcactgagggtctgctcaaagctcacctgagtggagtaggcattgccccagcccggtcaggctctcagatgcagctggttgcaccccgaggggagatgccttactccccacacctcccaggagctgcatcccagctcagaaggctgagagggtttgcagtggagccctgagcagggctggcatatggcaagtaggcaaatgacatgcgccaagggtacaggtctgtcttacagacctgctgaacgaagaggatactaacgagccggggaacggaaatgcccgcgacagagtcacatggcctgttccttgtgtactgcggggccccgagacctggaaagagaaacttccaggggcattccggatccattaatttcgtacctgggctctaggaagtcttcctatcattccggccagggcgactttaacacattcgtttacaacccgaatggtgggccctggtagctcggagggggacgcggatttttaccaattacaggctcggcgcaagggagccccccggatccactgagccgcgcaca

SEQ ID NO: 216 - DNA, 2769 bp, Homo sapiens
  CDS (429)..(2141)
ccgcagtccggggatcgggtcgaggggagaagaaaaaggggtgctcgggagcagcccccggctacctcccctggaggcacagagggcgggggccttggcgaatggctttcttgctggccacttgcggagtgagtagaccccgagggtctgggagaggggccggcccctacccctgagtccccggggtcccggccgccaggccggagcgcgaatgtcgtgctcaccctgcctccttcccgccgccccctgggggtttggattcaggatttgttcctagtgtccaagattttgataagaaacttacagaagctgatgcttacctacaaatcttgattgaacaattaaagctttttgatgacaagcttcaaaactgcaaagaagatgaacagagaaagaaaattgaaactctcaaagagacaacaaatagcatggtagaatcaattaaacactgcattgtgttgctgcagattgccaaagaccagagtaatgcggagaagcacgcagatggaatgataagtactattaatcccgtagatgcaatatatcaacctagtcctttggaacctgtgatcagcacaatgccttcccagactgtgttacctccagaacctgttcagttgtgtaagtcagagcagcgtccatcttccctaccagttggacctgtgttggctaccttgggacatcatcagactcctacaccaaatagtacaggcagtggccattcaccaccgagtagcagtctcacttctccaagccacgtgaacttgtctccaaatacagtcccagagttctcttactccagcagtgaagatgaattttatgatgctgatgaattccatcaaagtggctcatccccaaagcgcttaatagattcttctggatctgcctcagtcctgacacacagcagctcgggaaatagtctaaaacgcccagataccacagaatcacttaattcttccttgtccaatggaacaagtgatgctgacctgtttgattcacatgatgacagagatgatgatgcggaggcagggtctgtggaggagcacaagagcgttatcatgcatctcttgtcgcaggttagacttggaatggatcttactaaggtagttcttccaacgtttattcttgaaagaagatctcttttagaaatgtatgcagacttttttgcacatccggacctgtttgtgagcattagtgaccagaaggatcccaaggatcgaatggttcaggttgtgaaatggtacctctcagcctttcatgcgggaaggaaaggatcagttgccaaaaagccatacaatcccattttgggcgagatttttcagtgtcattggacattaccaaatgatactgaagagaacacagaactagtttcagaaggaccagttccctgggtttccaaaaacagtgtaacatttgtggctgagcaggtttcccatcatccacccatttcagccttttatgctgagtgttttaacaagaagatacaattcaatgctcatatctggaccaaatcaaaattccttgggatgtcaattggggtgcacaacatagggcagggctgtgtctcatgtctagactatgatgaacattacattctcacattccccaatggctatggaaggtctatcctcacagtgccctgggtggaattaggaggagaatgcaatattaattgttccaaaacaggctatagtgcaaatatcatcttccacactaaacccttctatgggggcaagaagcacagaattactgccgagattttttctccaaatgacaagaagtctttttgctcaattgaaggggaatggaatggtgtgatgtatgcaaaatatgcaacaggggaaaatacagtctttgtagataccaagaagttgcctataatcaagaagaaagtgaggaagttggaagatcagaacgagtatgaatcccgcagcctttggaaggatgtcactttcaacttaaaaatcagagacattgatgcagcaactgaagcaaagcacaggcttgaagaaagacaaagagcagaagcccgagaaaggaaggagaaggaaattcagtgggagacaaggttatttcatgaagatggagaatgctgggtttatgatgaaccattactgaaacgtcttggtgctgccaagcattaggttggaagatgcaaagtttatacctgatgatcagggcagtaggcataattcagcaacaaacaatcttcctttgggagaaacctgttcattccaatcttctaattacagtggttcctatctcagggatactggactttctgacgcagatgaacaattaaggggaaaagcttcccttttccctctgtggcagttacgattttgacttcagtcctgagaaaaacttcaggttttgaaaatcagatgatgtcttctccttttccaaacaccacacgttgaaagcatttataaatccaagtctgaaactctgcgctctagtactgctgttaagatacacaacttgtttcttagttcatataatctcgggatacacacacacacacacatatatatacacacacatacgtatacacacacatacatatatataaatatacctgatgccagatttttttcataaatattctgcctactgtaaatatgggttcctctgagttgttttagaaaattagcgcaatgtattaaaatcaagtgttaggaaatttcatggtcttacctacaataacttttattttggaattgaactattattaaattgtatctaatcctggaaaaaaaaaaaaaaaaa

SEQ ID NO: 217 - DNA, 1022 bp, Homo sapiens
  CDS (627)..(1019)
aaggatccttaattaaattaatccccccccccgggtctgcatctccatcggaaagtgcgcttgccacatcccttcggatcacttcgtcctcccgagagcgttctgccttctacagctcggaaagaaagaaatcttagctgtgaagtgaccgtggagaaagcgcaggaagcgacacaattggttagggaggcagagagtgtgagcgggcgcaccccttgcctggggaccgcgctcgcgggcggggacggagcatcccagtggctgcacccgccgctccgcgctcctgcctggcgtcgccaaccccgcggcggccgctggaattccagagctgccaggcgctcccagccggtctcggcaaacttttccccagcccacgtgctaaccaagcggctcgcttcccgagcccgggatggagcaccgcgcctagggaggccgcgccgcccgagacgtgcgcacggttcgtggcggagagatgctgatcgcgctgaactgaccggtgcggcccgggggtgagtggcgagtctccctctgagtcctccccagcagcgcggccggcgccggctctttgggcgaaccctccagttcctagactttgagaggcgtctctcccccgcccgaccgcccagatgcagtttcgccttttctcctttgccctcatcattctgaactgcatggattacagccactgccaaggcaaccgatggagacgcagtaagcgaggtgggtccttctctgccaaagctagttatgtatcaaatcccatttgcaagggttgtttgtcttgttcaaaggacaatgggtgtagccgatgtcaacagaagttgttcttcttccttcgaagagaagggatgcgccagtatggagagtgcctgcattcctgcccatccgggtactatggacaccgagccccagatatgaacagatgtgcaatttataaacttccagaggaagatatgttccaccttggaaaggattcctgttcagatttctttagactacctatggcgggggtggtggtttga

SEQ ID NO: 218 - DNA, 4008 bp, Homo sapiens
  CDS (267)..(2333)
aagtgacccagggagacaaacacttggagatacttggggctgagtttgagcaagactccctaacctgtgtctggacaagtctgatgtcctgtgtggcccaagaagaactgaccccgtgtctggagctcccaccgttattgcatccctgctgtggctcacctgctgctgtctccaggagcccctgagaagatttgcctcctctcccctgctaagctccaggtcctgagattgaattaggggctggagctcactgcactccagcagtcatgggacccaggatagggccagcgggtgaggtaccccaggtaccagacaaggaaaccaaagccacaatgggcacagaaaacacacctggaggcaaagccagcccagaccctcaggacgtgcggccaagtgtgttccataacatcaagctgttcgttctgtgccacagcctgctgcagctggcgcagctcatgatctccggctacctaaagagctccatctccacagtggagaagcgcttcggcctctccagccagacgtcggggctgctggcctccttcaacgaggtggggaacacagccttgattgtgtttgtgagctattttggcagccgggtgcaccgaccccgaatgattggctatggggctatccttgtggccctggcgggcctgctcatgactctcccgcacttcatctcggagccataccgctacgacaacaccagccctgaggatatgccacaggacttcaaggcttccctgtgcctgcccacaacctcggccccagcctcggccccctccaatggcaactgctcaagctacacagaaacccagcatctgagtgtggtggggatcatgttcgtggcacagaccctgctgggcgtgggcggggtgcccattcagccctttggcatctcctacatcgatgactttgcccacaacagcaactcgcccctctacctcgggatcctgtttgcagtgaccatgatggggccaggcctggcctttgggctgggcagcctcatgctgcgcctttatgtggacattaaccagatgccagaaggtggtatcagcctgaccataaaggacccccgatgggtgggtgcctggtggctgggtttcctcatcgctgccggtgcagtggccctggctgccatcccctacttcttcttccccaaggaaatgcccaaggaaaaacgtgagcttcagtttcggcgaaaggtcttagcagtcacagactcacctgccaggaagggcaaggactctccctctaagcagagccctggggagtccacgaagaagcaggatggcctagtccagattgcaccaaacctgactgtgatccagttcattaaagtcttccccagggtgctgctgcagaccctacgccaccccaccttcctgcccaagttcctggagcgccagttttccatcacagcctcctacgccaacctgctcatcggctgcctctccttcccttcggtcatcgtgggcatcgtggtgggtggcgtcctggtcaagcggctccacctgggccctgtgggatgcggtgccctttgcctgctggggatgctgctgtgcctcttcttcagcctgccgctcttctttatcggctgctccagccaccagattgcgggcatcacacaccagaccagtgcccaccctgggctggagctgtctccaagctgcatggaggcctgctcctgcccattggacggctttaaccctgtctgcgaccccagcactcgtgtggaatacatcacaccctgccacgcaggctgctcaagctgggtggtccaggatgctctggacaacagccaggttttctacaccaactgcagctgcgtggtggagggcaaccccgtgctggcaggatcctgcgactcaacgtgcagccatctggtggtgcccttcctgctcctggtcagcctgggctcggccctggcctgtctcacccacacaccctccttcatgctcatcctaagaggagtgaagaaagaagacaagactttggctgtgggcatccagttcatgttcctgaggattttggcctggatgcccagccccgtgatccacggcagcgccatcgacaccacctgtgtgcactgggccctgagctgtgggcgtcgagctgtctgtcgctactacaataatgacctgctccgaaaccggttcatcggcctccagttcttcttcaaaacaggttctgtgatctgcttcgccttagttttggctgtcctgaggcagcaggacaaagaggcaaggaccaaagagagcagatccagccctgccgtagagcagcaattgctagtgtcggggccagggaagaagccagaggattcccgagtgtgagctgtcttggggccccacctggccaagagtagcagccacagcagtacctcctctgagtcctttgcccaagattgggtgtcaagagccctgtgttccattctggctcctccactaaattgctgtgtgacttcaggcaagacattgatcctctctcagcctttgcttgctagtctgaaccaaagagttgtttgggcatttgctgtgttggccatttctggagcaagagggtcttcttcctccttcccccagccagccagctgtcctggggccaggctttcctgggtggaaagaagtatacctttccctggggccctaggatagcaaagtgagccatagtgggccaggctgccctccatgctgggccccagcccaggtctgcactcgcctggatcaccttctttgagccttagccatctcctgtcaggtaggaatgaacttgccagccttcaggctcgttcagctatgaccatctgtgcggtcagggtacactcagctctcctccccaactccagcagcctttaagaagtgtccctttggcgccccctggaggcagagcactgagctggaccctgggtagactcccacagggaggacggagctggcctcaggagtgggacacccagacttggcagggccttcaagaggcctgtgtgggggccccaggaatccttagctgaagcggggagactcactctccatctcaggaaattctagcccttgccctcagggagccacggttgagggtgaggcccaacacctgccttagggccctgggtgggcaagtctgggccctggggtagggagggagactcaggcccacacttgggtattttctaatttcagacaaacacacactcagcgcgcactcactgattcctacacattgccaagatttcacacatgtgaccaggggccaccaaagtccctgtgacctttgtgactaggatcctaatttctctattttctcctgggtgcctgggtctgtgtcacctggggcagtgtggataatgtttagttctgtgacactgttttttgggggtggcacctggttctccgatgcctgggctggtgtcaggcccaggactgtagtgctgggagcagtaaagctcagctctgtgtaatgagtgatgctatggcttgctcgtgtcttatgatccaatccttttctacatcagcccttgttttgttttatggctagtcttatctggcctggttatttccttgcggggaggagagggtttgctaatctgctcccagcccaacctattaccaccccacctcgctgggacctactgctcgggaggcagcagacagggagccaccagcagtggcttcctggccctgtgctgggggtggggggaagctgggggcacatgtggcccttgccttctgagcagctcccagtgccagggctttgagactttcccacatgataaaagaaaagggaggtacagaagttccaattccctttttattttgctggttggtatctgtaaatgtttaataaatatctgagcatgtatctatcaacgccaagaatttcaaagtctccttcaacaatatgaggcttttaggatgtttatattccttcatccctcttgtttcccaggttttgcagggaaaaaaagtctggaattatagatacagcttattattaaatttgttcttgcat

SEQ ID NO: 219 - DNA, 503 bp, Homo sapiens
  CDS (112)..(417)
cggacgcgtgggaagagatctaggacttctagcccctgaactttcagccgaatacatcttttccaaaggagtgaattcaggcccttgtatcactggcagcaggacgtgaccatggagaagctgttgtgtttcttggtcttgaccagcctctctcatgcttttggccagacagacatgtcgaggaaggcttttgtgtttcccaaagagtcggatacttcctatgtatccctcaaagcaccgttaacgaagcctctcaaagccttcactgtgtgcctccacttctacacggaactgtcctcgacccatgagattaacaccatctatcttggcgggcccttcagtcctaatgtcctgaactggcgggcactgaagtatgaagtgcaaggcgaagtgttcaccaaaccccagctgtggccctgaggcccagctgtgggtcctgaagtgctttcttaattttatggctcttctgggaaactcctccccttttccacacgaaccttgtg

SEQ ID NO: 220 - DNA, 3304 bp, Homo sapiens
  CDS (39)..(2027)
ctttctccacgataatctaaagtaaagataaaaacaacatggctgcaaaggagatactggaggcagtgttaaatgtggccctgagggtgccaagcatcatgctgttggatgtcctgtacagatgggatgtcagctcctttttccagcagatccaaagaagtagccttagtaataaccctcttttccagtataagtatttggctcttaatatgcattatgtaggttatatcttaagtgtggtgctgctaacattgcccaggcagcatctggttcagctttatctatattttttgactgctctgctcctctatgctggacatcaaatttccagggactatgttcggagtgaactggagtttgcctatgagggaccaatgtatttagaacctctctctatgaatcggtttaccacagccttaataggtcagttggtggtgtgtactttatgctcctgtgtcatgaaaacaaagcagatttggctgttttcagctcacatgcttcctctgctagcacgactctgccttgttcctttggagacaattgttatcatcaataaatttgctatgatttttactggattggaagttctctattttcttgggtctaatcttttggtaccttataaccttgctaaatctgcatacagagaattggttcaggtagtggaggtatatggccttctcgccttgggaatgtccctgtggaatcaactggtagtccctgttcttttcatggttttctggctcgtcttatttgctcttcagatttactcctatttcagtactcgagatcagcctgcatcacgtgagaggcttcttttcctttttctgacaagtattgcggaatgctgcagcactccttactctcttttgggtttggtcttcacggtttcttttgttgccttgggtgttctcacactctgcaagttttacttgcagggttatcgagctttcatgaatgatcctgccatgaatcggggcatgacagaaggagtaacgctgttaatcctggcagtgcagactgggctgatagaactgcaggttgttcatcgggcattcttgctcagtattatccttttcattgtcgtagcttctatcctacagtctatgttagaaattgcagatcctattgttttggcactgggagcatctagagacaagagcttgtggaaacacttccgtgctgtaagcctttgtttatttttattggtattccctgcttatatggcttatatgatttgccagtttttccacatggatttttggcttcttatcattatttccagcagcattcttacctctcttcaggttctgggaacactttttatttatgtcttatttatggttgaggaattcagaaaagagccagtggaaaacatggatgatgtcatctactatgtgaatggcacttaccgcctgctggagtttcttgtggccctctgtgtggtggcctatggcgtctcagagaccatctttggagaatggacagtgatgggctcaatgatcatcttcattcattcctactataacgtgtggcttcgggcccagctggggtggaagagctttcttctccgcagggatgctgtgaataagattaaatcgttacccattgctacgaaagagcagcttgagaaacacaatgatatttgtgccatctgttatcaggacatgaaatctgctgtgatcacgccttgcagtcattttttccatgcaggctgtcttaagaaatggctgtatgtccaggagacctgccctctgtgccactgccatctgaaaaactcctcccagcttccaggattaggaactgagccagttctacagcctcatgctggagctgagcaaaacgtcatgtttcaggaaggtactgaacccccaggccaggagcatactccagggaccaggatacaggaaggttccagggacaataatgagtacattgccagacgaccagataaccaggaaggggcttttgaccccaaagaatatcctcacagtgcgaaagatgaagcacatcctgttgaatcagcctagaggagaagcagcaggaatgatgctttgatactctggaggagaagttaactcaagatggaattcatgttctgatttgaggaatgaaaatgagatgatcaggcaggaaactgacattccaaggatctaatccaggaagtactctcagtggggaccacctgctttcatcccctgacattgtgggagaaattttgcaatgtatgctaatcaaaatgtatttatatgttctctgctgatgttttatagaggtttgtgaagaaaattcaacctcagcaacttcagaaactgcccctgatacgtgtgagagagaaataaaatcagattttgagtgttgaagggactgaggaagtgaggataaagagcatgaggacagcatggaaagaaggaggcagaagtggaactgaactttcactctccatgggacagatcaatctcattatcaagtctgaatagcaaccagccctctcctccaccccgtttctcctcagttaattggagctcagtcaggtgattattgagtcttgtacagcactgaaatgaaatcaaagatgaagaagcattgattgtattcaaagattgaagcacgctcatactttgtatgtgctttagggaaggggtgggtgggcacttgggccttgcgggtgcattcatgtaatctgagactcttgaactttatgacggagtcttcagtattttgatgtatatgaaacttttgttaaatatgttgtatacttcgctggctgtgtgaagtaaactaaaactctgatgaacactttggagtctgctttagtgaaggagaccaaagtgggaagggctttagggcactgatagaggccctgggtgtacttttcaatcctgtgtaatgtttaattcttgcaactgaatcaaaacagtgttaaattatggcaatatttgcactttgggaatgagtacataactgtatgatcacactctgcaaatgccacttttaaagctgttaatagactttgcaccttttctttgacaaggatgtgtcatatttaaatttttacattcatcatggctacaggtagaactggggaggggggaatgtaattttttatgggaattttgatatgaaaagaaactagtcatttatttatacaataggcttggctcaaaaagtgtttttcagacctcggtattcctaatgtgggatgtgactttattttatttttagtagcaaatttggatgtagactgacagacatagctgaatgtcttaataaatttaaatttgaagataaaaaaaaaaaaaaa

SEQ ID NO: 221 - DNA, 3032 bp, Homo sapiens
  CDS (144)..(3023)
cgcggccgcgtcgactttaagattaaattcatgtattgaaaatattgttcagaccccatgtgacataactggagccagtgcagtgccatgaagaactacgagattagcctggatattaacttgtcttctagagaatagatttcatgttccattcttctgcaatggttaattcacacagaaaaccaatgtttaacattcacagaggattttactgcttaacagccatcttgccccaaatatgcatttgttctcagttctcagtgccatctagttatcacttcactgaggatcctggggctttcccagtagccactaatggggaacgatttccttggcaggagctaaggctccccagtgtggtcattcctctccattatgacctctttgtccaccccaatctcacctctctggactttgttgcatctgagaagatcgaagtcttggtcagcaatgctacccagtttatcatcttgcacagcaaagatcttgaaatcacgaatgccacccttcagtcagaggaagattcaagatacatgaaaccaggaaaagaactgaaagttttgagttaccctgctcatgaacaaattgcactgctggttccagagaaacttacgcctcacctgaaatactatgtggctatggacttccaagccaagttaggtgatggctttgaagggttttataaaagcacatacagaactcttggtggtgaaacaagaattcttgcagtaacagattttgagccaacccaggcacgcatggctttcccttgctttgatgaaccgttgttcaaagccaacttttcaatcaagatacgaagagagagcaggcatattgcactatccaacatgccaaaggttaagacaattgaacttgaaggaggtcttttggaagatcactttgaaactactgtaaaaatgagtacataccttgtagcctacatagtttgtgatttccactctctgagtggcttcacttcatcaggggtcaaggtgtccatctatgcatccccagacaaacggaatcaaacacattatgctttgcaggcatcactgaagctacttgatttttatgaaaagtactttgatatctactatccactctccaaactggatttaattgctattcctgactttgcacctggagccatggaaaattggggcctcattacatatagggagacgtcactgctttttgaccccaagacctcttctgcttccgataaactgtgggtcaccagagtcatagcccatgaactggcgcaccagtggtttggcaacctggtcacaatggaatggtggaatgatatttggcttaaggagggttttgcaaaatacatggaacttatcgctgttaatgctacatatccagagctgcaatttgatgacttttttttgaatgtgtgttttgaagtaattacaaaagattcattgaattcatcccgccctatctccaaaccagcggaaaccccgactcaaatacaggaaatgtttgatgaagtttcctataacaagggagcttgtattttgaatatgctcaaggattttctgggtgaggagaaattccagaaaggaataattcagtacttaaagaagttcagctatagaaatgctaagaatgatgacttgtggagcagtctgtcaaatagttgtttagaaagtgattttacatctggtggagtttgtcattcggatcccaagatgacaagtaacatgctcgcctttctgggggaaaatgcagaggtcaaagagatgatgactacatggactctccagaaaggaatccccctgctggtggttaaacaagacgggtgttcactccgactgcaacaggagcgcttcctccagggggttttccaggaagaccctgaatggagggccctgcaggagaggtacctgtggcatatcccattgacctactccacgagttcttctaatgtgatccacagacacattctaaaatcaaagacagatactctggatctacctgaaaagaccagttgggtgaaatttaatgtggactcaaatggttactacatcgttcactatgagggtcatggatgggaccaactcattacacagctgaatcagaaccacacacttctcagacctaaggacagagtaggtctgattcatgatgtgtttcagctagttggtgcagggagactgaccctagacaaagctcttgacatgacttactacctccaacatgaaacaagcagccccgcacttctcgaaggtctgagttacttggaatcgttttaccacatgatggacagaaggaatatttcagatatctctgaaaacctcaagcgttaccttcttcagtattttaagccagtgattgacaggcaaagctggagtgacaagggctcagtctgggacaggatgctccgctcggctctcttgaagctggcctgtgacctgaaccatgctccttgcatccagaaagctgctgaactcttctcccagtggatggaatccagtggaaaattaaatataccaacagatgttttaaagattgtgtattctgtgggtgctcagacaacagcaggatggaattaccttttagagcaatatgaactgtcaatgtcaagtgctgaacaaaacaaaattctgtatgctttgtcaacgagcaagcatcaggaaaagttactgaagttaattgaactaggaatggaaggaaaggttatcaagacacagaacttggcagctctccttcatgcgattgccagacgtccaaaggggcagcaactagcatgggattttgtaagagaaaattggacccatcttctgaaaaaatttgacttgggctcatatgacataaggatgatcatctctggcacaacagctcacttttcttccaaggataagttgcaagaggtgaaactattttttgaatctcttgaggctcaaggatcacatctggatatttttcaaactgttctggaaacgataaccaaaaatataaaatggctggagaagaatcttccgactctgaggacttggctaatggttaatacttaaatggtc

SEQ ID NO: 222 - DNA, 1060 bp, Homo sapiens
  CDS (62)..(802)
gtgtgactgaagaggagctcacagttcccagcgtctgctcccacggtgtccagcgcccagaatgcggcttctggtcctgctatggggttggctgctgctcccaggttatgaagccctggaggggccagaggaaatcagcgggttcgaaggggacactgtgtccctgcagtgcacctacagggaagagctgaggggacaccggaagtactggtgcaggaagggtgggatcctcttctctcgctgctctggccacatctatgcagaagaagaaggccaggagacaatgaagggcaggttgtccatccgtgacagccgccaggagctctcgctcattgtgaccctgtggaacctcaccctgcaagacgctggggagtactggtgtggggtcgaaaaacggggccccgatgagtctttactgatctctctgttcgtctttccagggagctcccgcccccccatgcagctggactccacctcagcagaggacaccagtccagctctcagcagtggcagctctaagcccagggtgtccatcccgatggtccgcatactggccccagtcctggtgctgctgagccttctgtcagccgcaggcctgatcgccttctgcagccacctgctcctgtggagaaaggaagctcaacaggccacggagacacagaggaacgagaagttctgcctctcacgcttgactgcggaggaaaaggaagccccttcccaggcccctgagggggacgtgatctcgatgcctcccctccacacatctgaggaggagctgggcttctcgaagtttgtctcagcgtagggcaggaggccctcctggccaggccagcagtgaagcagtatggctggctggatcagcaccgattcccgaaagctttccacctcagcctcagagtccagctgcccggactccagggctctccccaccctccccaggctctcctcttgcatgttccagcctgacctagaagcgtttgtcagccctggagcccagagcggtggccttgctcttccggctggagactgggacatccctgataggttcacatccctgggc

SEQ ID NO: 223 - DNA, 2304 bp, Homo sapiens
  CDS (200)..(2002)
aggagctcaaaaggagaagaaaacagtaggaggcaggggaagcagcctctgtctccatctctgccctttgaaacaaaagggtatttcttttctctcttcagcccccaacccagtggaggcccggcttgggacattgttcacttcccctcgcttcccctctagaagccccctttgccatccctgcaccttgtttcgggtgatgcccgagagggagctgtggccagcggggactggctcagaacccgtgacccgtgtcggcagctgtgacagcatgatgagcagcacctccacccgctctggatctagtgatagcagctacgacttcctgtccactgaagagaaggagtgtctgctcttcctggaggagaccattggctcactggacacggaggctgacagcggactgtccactgacgagtctgagccagccacaactcccagaggtttccgagcactgcccataacccaacccactccccggggaggtccagaggagaccatcactcagcaaggacgaacgccaaggacagtaactgagtccagctcatcccaccctcctgagccccagggcctaggcctcaggtctggctcctacagcctccctaggaatatccacattgccagaagccagaacttcaggaaaagcaccacccaggctagcagtcacaaccctggagaaccggggaggcttgcgccagagcctgagaaagaacaggtcagccagagcagccaacccaggcaggcacctgccagcccccaggaggctgcccttgacttggacgtggtgctcatccctccgccagaagctttccgggacacccagccagagcagtgtagggaagccagcctgcccgaggggccaggacagcagggccacacaccccagctccacacaccatccagctcccaggaaagagagcagactccttcagaagccatgtcccaaaaagccaaggaaacagtctcaaccaggtacacacaaccccagcctcctcctgcagggttgcctcagaatgcaagagctgaagatgctcccctctcatcaggggaggacccaaacagccgactagctcccctcacaacccctaagccccggaagctgccacctaatattgttctgaagagcagccgaagcagtttccacagtgacccccagcactggctgtcccgccacactgaggctgcccctggagattctggcctgatctcctgttcactgcaagagcagagaaaagcacgtaaagaagctctagagaagctggggctaccccaggatcaagatgagcctggactccacttaagtaagcccaccagctccatcagacccaaggagacacgggcccagcatctgtccccagctccaggtctggctcagcctgcagctccagcccaggcctcagcagctattcctgctgctgggaaggctctggctcaagctccggctccagctccaggtccagctcagggacctttgccaatgaagtctccagctccaggcaatgttgcagctagcaaatctatgccaattcctatccctaaggccccaagggcaaacagtgccctgactccaccgaagccagagtcagggctgactctccaggagagcaacacccctggcctgagacagatgaacttcaagtccaacactctggagcgctcaggcgtgggactgagcagctacctttcaactgagaaagatgccagccccaaaaccagcacttctctgggaaagggctccttcttggacaagatctcgcccagtgtcttacgtaattctcggccccgcccggcctccctgggcacggggaaagattttgcaggtatccaggtaggcaagctggctgacctggagcaggagcagagctccaagcgcctgtcctaccaaggacagagccgtgacaagcttcctcgccccccctgtgtcagtgtcaagatctccccaaagggtgtccccaatgaacacagaagggaggccctgaagaagctgggactgttgaaggagtagactctgcgaccagtacagaccctgtcctggctgaacaagaagagacacatgctccacttgggagcctttgccaccacgcaactcagggctcaagatgaatgggagggagagatttgagtccaagcatacatttatattcagtgttgtgccattgagttcccatgtggatcattctgaaggtgatctccacaagagggtgtgtgtgtgtgtgtttggtgtgtgtgtggagggggggccgctggatacatcactgaagctattgatataacacaatgagtcactgttcagaaaaaaaaaaa

SEQ ID NO: 224 - DNA, 2641 bp, Homo sapiens
  CDS (22)..(1587)
cggcacgagggcagccacaaaatggcggcgggtgggagcggcgggcgtgcgtcgtgcccgccgggggtcggggtcggcccgggcacggggggcagtcccgggcccagcgccaacgccgccgccaccccggcccccggcaacgcggccgccgccgccgccgccgccgccgccgcccctgggccgacgccgcccgccccgccgggccccgggacagacgcgcaggccgcgggcgcggagcgggcggaggaggcggcgggcccgggggcggcggcgctgcagcgcgaggccgcgtacaactggcaggccagcaagcccaccgtgcaggagcgcttcgccttcctcttcaacaacgaggtgctgtgcgacgtgcacttcctggtgggcaaggggctcagctcgcagcgcatccccgcgcacaggttcgtgctggccgtgggcagcgctgtctttgatgccatgttcaacgggggaatggccacaacatccacggagattgagctgcccgacgtggaacccgccgccttcctcgcactgctcaagtttctctactcggacgaggtgcagattggcccggagacggtgatgaccacgctatacaccgccaagaagtacgcggtgccagcgctcgaggcccattgcgtggagttcctgaagaagaacctgcgagccgacaacgccttcatgctgctcacgcaggcgcgactcttcgatgaaccgcagctggccagcctgtgcctggagaacatcgacaaaaacactgcagacgccatcaccgcggagggcttcaccgacattgacctggacacgctggtggctgtcctggagcgcgacacactgggcatccgtgaggtgcggctgttcaatgccgttgtccgctggtccgaggccgagtgtcagcggcagcagctgcaggtgacgccagagaacaggcggaaggttctgggcaaggccctgggcctcattcgcttcccgctcatgaccatcgaggagttcgctgcaggtcccgcacagtcgggcatcctggtggaccgcgaggtggtcagcctcttcctgcacttcaccgtcaaccccaagccacgagtggagttcattgaccggccccgctgctgcctgcgtgggaaggagtgcagcatcaaccgcttccagcaggtggagagtcgctggggctacagcgggaccagtgaccgcatcaggttctcagtcaacaagcgcatcttcgtggtgggatttgggctgtatggatccatccacgggcccaccgactaccaagtgaacatccagattattcacaccgatagcaacaccgtcttgggccagaacgacacgggcttcagctgcgacggctcagccagcaccttccgcgtcatgttcaaggagccggtggaggtgctgcccaacgtcaactacacggcctgtgccacgctcaagggcccagactcccactacggcaccaaaggcctgcgcaaggtgacacacgagtcgcccaccacgggcgccaagacctgcttcaccttttgctacgcggccgggaacaacaatggcacatccgtggaggacggccagatccccgaggtcatcttctacacctaggctgcccgacaccgacaccgccctccctccgtggggatagccgcagccccaggccatcatctgctgctggggcccccccaccacgcggtgccaggcccagtgtcccccaggccgtctgtccactccatgccacctttctcagcatcaggacggggttgccctgtgttcaccacgagtgtggctgctggatcagggcagccggggaggtggccaggccagtggccaggccctgtggagacaatccctcaggactagggacagggctgtgccggcctgggccagggcccacggacccgcagctcagggcgcctgcccacgtcgtctgccggcggtgcgccgcgggcgtccctcgcgtctcttcactgcacattgcaatgcatttgcgattcccatttctctgctaggagccagcctgggtggcgctgctcccagagccgtgggtcccagaccttgcgttccttttgttcctgtccgtttatcaggacacgggccccacctgtcacgtgcccgaggccacccaagcccagcctgcggggcgttcccactgcctggatgccggcttgagttctgcgcacgcaggattcagtgtggggacggcccctgccggataggcctagccctggcccaggtggtgagcggtttgcagtgtccgttctcatccacctgatgggcccagataaaggcccccgctgtccagcctccctggacggccctcgcggtccctgcagcccaagatgggactcagaccctgtgccccagagctcccctgccgcagaatggggccccagccggccccgaccgggtccaggagcactgctcgcctgtacatactgttgccctagcccacctggtgccgtgggagccacccccaggtgctgggggcacagcccctccccactccggccacgcccccacccaccccgcgtgtttctgccctgtgactcctggaacctgcgtcctccccaaagccatgggaggggtgtcctcctcagaccatgcccccagatgatttttttaaataaagaaacaaatgcacctgcaaaaaaaaaaa

SEQ ID NO: 225 - DNA, 1029 bp, Homo sapiens
  CDS (149)..(982)
gcgacgcccagaccgccggtcccggggccccctgggccacgccgatcacggggagcccctcgactgcctcccagaacaaagtgggaaagggaagcttagcccgccgctgccgcctccgagcagcccgccaggactctggctactggagatgggcgcccggctatcgcggcgacggctgccggcggacccatccctggccctggacgcgctgcccccggagctgctggtgcaggtgctgagccacgtgccgccacgctccttggtcacgcgatgccgcccagtgtgccgcgcctggcgcgacatagtggacgggcccactgtgtggctgctgcagctggcccgcgaccgcagcgccgagggccgcgcactctacgcagtggctcaacgctgcctgcccagcaacgaagacaaggaggagttcccgctgtgcgccctggcgcgctactgtctgcgcgcgcccttcggccgcaatctcatcttcaactcctgcggagagcagggcttcagaggctgggaggtggagcatggcgggaacggctgggccatagaaaagaacctaacaccggtgcctggggctccttcgcagacctgcttcgtgacctctttcgaatggtgctccaagaggcagcttgtggacctggtgatggaaggggtgtggcaggagctgctggacagcgcccagattgagatctgtgtggctgactggtggggcgctcgagagaactgcggctgcgtctaccagctccgggtccgccttctggatgtgtatgaaaaggaagtggtcaagttctcagcctcacctgacccggtccttcagtggactgagaggggctgccgacaggtctcccacgtcttcaccaactttggcaagggcatccgctacgtatcttttgagcagtacgggagagacgtgagttcctgggtggggcactacggcgcccttgtgacccactccagtgtgagggtcaggatccgtctgtcctagcgactggactactgcctgacgttgtcagtcaagaccagccttgc

SEQ ID NO: 226 - DNA, 1437 bp, Homo sapiens
  CDS (32)..(1255)
atttggcggttccgttaggtctgagggagcgatggcggtacgcgcgttgaagctgctgaccacactgctggctgtcgtggccgctgcctcccaagccgaggtcgagtccgaggcaggatggggcatggtgacgcctgatctgctcttcgccgaggggaccgcagcctacgcgcgcggggactggcccggggtggtcctgagcatggaacgggcgctgcgctcccgggcagccctccgcgcccttcgcctgcgctgccgcacccagtgtgccgccgacttcccgtgggagctggaccccgactggtcccccagcccggcccaggcctcgggcgccgccgccctgcgcgacctgagcttcttcgggggccttctgcgtcgcgctgcctgcctgcgccgctgcctcgggccgccggccgcccactcgctcagcgaagagatggagctggagttccgcaagcggagcccctacaactacctgcaggtcgcctacttcaagatcaacaagttggagaaagctgttgctgcagcacacaccttcttcgtgggcaatcctgagcacatggaaatgcagcagaacctagactattaccaaaccatgtctggagtgaaggaggccgacttcaaggatcttgagactcaaccccatatgcaagaatttcgactgggagtgcgactctactcagaggaacagccacaggaagctgtgccccacctagaggcggcgctgcaagaatactttgtggcctatgaggagtgccgtgccctctgcgaagggccctatgactacgatggctacaactaccttgagtacaacgctgacctcttccaggccatcacagatcattacatccaggtcctcaactgtaagcagaactgtgtcacggagcttgcttcccacccaagtcgagagaagccctttgaagacttcctcccatcgcattataattatctgcagtttgcctactataacattgggaattatacacaggctgttgaatgtgccaagacctatcttctcttcttccccaatgacgaggtgatgaaccaaaatttggcctattatgcagctatgcttggagaagaacacaccagatccatcggcccccgtgagagtgccaaggagtaccgacagcgaagcctactggaaaaagaactgcttttcttcgcttatgatgtttttggaattccctttgtggatccggattcatggactccagaagaagtgattcccaagagattgcaagagaaacagaagtgaggaccttgaagaaactgcatggttggatcagtctgatgaagcacttgaggcttcctgagcccaggcagatgtgaactcctggcaaggggtgggcaggtccagtttactaagtgagggtccagcccgagggctggcactggaatgcagtcctcagagcggttgtggtcatagaccgcgag

SEQ ID NO: 227 - DNA, 2152 bp, Homo sapiens
  CDS (32)..(2149)
atttggcggttccgttaggtctgagggagcgatggcggtacgcgcgttgaagctgctgaccacactgctggctgtcgtggccgctgcctcccaagccgaggtcgagtccgaggcaggatggggcatggtgacgcctgatctgctcttcgccgaggggaccgcagcctacgcgcgcggggactggcccggggtggtcctgagcatggaacgggcgctgcgctcccgggcagccctccgcgcccttcgcctgcgctgccgcacccagtgtgccgccgacttcccgtgggagctggaccccgactggtcccccagcccggcccaggcctcgggcgccgccgccctgcgcgacctgagcttcttcgggggccttctgcgtcgcgctgcctgcctgcgccgctgcctcgggccgccggccgcccactcgctcagcgaagagatggagctggagttccgcaagcggagcccctacaactacctgcaggtcgcctacttcaagatcaacaagttggagaaagctgttgctgcagcacacaccttcttcgtgggcaatcctgagcacatggaaatgcagcagaacctagactattaccaaaccatgtctggagtgaaggaggccgacttcaaggatcttgagactcaaccccatatgcaagaatttcgactgggagtgcgactctactcagaggaacagccacaggaagctgtgccccacctagaggcggcgctgcaagaatactttgtggcctatgaggagtgccgtgccctctgcgaagggccctatgactacgatggctacaactaccttgagtacaacgctgacctcttccaggccatcacagatcattacatccaggtcctcaactgtaagcagaactgtgtcacggagcttgcttcccacccaagtcgagagaagccctttgaagacttcctcccatcgcattataattatctgcagtttgcctactataacattgggaattatacacaggctgttgaatgtgccaagacctatcttctcttcttccccaatgacgaggtgatgaaccaaaatttggcctattatgcagctatgcttggagaagaacacaccagatccatcggcccccgtgaggattcatggactccagaagaagtgattcccaagagattgcaagagaaacagaagtcagaacgggaaacagccgtacgcatctcccaggagattgggaaccttatgaaggaaatcgagacccttgtggaagagaagaccaaggagtcactggatgtgagcagactgacccgggaaggtggccccctgctgtatgaaggcattagtctcaccatgaactccaaactccttgatggttcccagcgggtggtgatgggcggcgtaatctctgaccaccaatgtcaggagctgcagagactgaccaatggggcagcaacctcaggagatggctaccggggtcagacctccccacatactcccaatgaaaagttctatggtgtcactgtcttcaaagccctcaagctggggcaagaaggcaaagttcctctgcagagtgcccacctgtactacaacgtgacggagaaagtgcggcgcatcatggagtcctacttccgcctggatacgcccctctacttttcctactctcatctggtgtgccgcactgccatcgaagaggtccaggcagagaggaaggatgatagtcatccagtccacgtggacaactgcatcctgaatgccgagaccctcgtgtgtgtcaaagagcccccagcctacaccttccgcgactacagcgccatcctttacctaaatggggacttcgatggcggaaacttttatttcactgaactggatgccaagaccgtgacggcagaggtgcagcctcagtgtggaagagccgtgggattctcttcaggcactgaaaacccacatggagtgaaggctgtcaccagggggcagcgctgtgccatcgccctgtggttcaccctggaccctcgacacagcgagcgggacagggtgcaggcagatgacctggtgaagatgctcttcagcccagaagagatggacctctcccaggagcagcccctggatgcccagcagggcccccccgaacctgcacaagagtctctctcaggcagtgaatcgaagcccaaggatgagctatga

SEQ ID NO: 228 - DNA, 2242 bp, Homo sapiens
  CDS (32)..(2239)
ggctggcggttccgttaggtctgagggagcgatggcggtacgcgcgttgaagctgctgaccacactgctggctgtcgtggccgctgcctcccaagccgaggtcgagtccgaggcaggatggggcatggtgacgcctgatctgctcttcgccgaggggaccgcagcctactcgcgcggggactggcccggggtggtcctgagcatggaacgggcgctgcgctcccgggcagccctccgcgcccttcgcctgcgctgccgcacccagtgtgccgccgacttcccgtgggagctggaccccgactggtcccccagcccggcccaggcctcgggcgccgccgccctgcgcgacctgagcttcttcgggggccttctgcgtcgcgctgcctgcctgcgccgctgcctcgggccgccggccgcccactcgctcagcgaagagatggagctggagttccgcaagcggagcccctacaactacctgcaggtcgcctacttcaagatcaacaagttggagaaagctgttgctgcagcacacaccttcttcgtgggcaatcctgagcacatggaaatgcagcagaacctagactattaccaaaccatgtctggagtgaaggaggccgacttcaaggatcttgagactcaaccccatatgcaagaatttcgactgggagtgcgactctactcagaggaacagccacaggaagctgtgccccacctagaggcggcgctgcaagaatactttgtggcctatgaggagtgccgtgccctctgcgaagggccctatgactacgatggctacaactaccttgagtacaacgctgacctcttccaggccatcacagatcattacatccaggtcctcaactgtaagcagaactgtgtcacggagcttgcttcccacccaagtcgagagaagccctttgaagacttcctcccatcgcattataattatctgcagtttgcctactataacattgggaattatacacaagctggtgaatgtgccaagacctatcttctcttcttccccaatgacgaggtgatgaaccaaaatttggcctattatgcagctatgcttggagaagaacacaccagatccatcggcccccgtgagagtgccaaggagtaccgacagcgaagcctactggaaaaagaactgcttttcttcgcttatgatgtttttggaattccctttgtggatccggattcatggactccagaagaagtgattcccaagagattgcaagagaaacagaagtcagaacgggaaacagccgtacgcatctcccaggagattgggaaccttatgaaggaaatcgagacccttgtggaagagaagaccaaggagtcactggatgtgagcagactgacccgggaaggtggccccctgctgtatgaaggcatcagtctcaccatgaactccaaactcctgaatggttaccagcgggtggtgatggacggcgtaatctctgaccacgagtgtcaggagctgcagagactgaccaatgtggcagcaacctcaggagatggctaccggggtcagacctccccacatactcccaatgaaaagttctatggtgtcactgtcttcaaagccctcaagctggggcaagaaggcaaagttcctctgcagagtgcccacctgtactacaacgtgacggagaaagtgcggcgcatcatggagtcctacttccgcctggatacgcccctctacttttcctactctcatctggtgtgccgcactgccatcgaagaggtccaggcagagaggaaggatgatagtcatccagtccacgtggacaactgcatcctgaatgccgagaccctcgtgtgtgtcaaagagcccccagcctacaccttccgcgactacagcgccatcctttacctaaatggggacttcgatggcggaaacttttatttcactgaactggatgccaagaccgtgacggcagaggtgcagcctcagtgtggaagagccgtgggattctcttcaggcactgaaaacccacatggagtgaaggctgtcaccagggggcagcgctgtgccatcgccctgtggttcaccctggaccctcgacacagcgagcgggacagggtgcaggcagatgacctggtgaagatgctcttcagcccagaagagatggacctctcccaggagcagcccctggatgcccagcagggcccccccgaacctgcacaagagtctctctcaggcagtgaatcgaagcccaaggatgagctatga

SEQ ID NO: 229 - DNA, 2412 bp, Homo sapiens
  CDS (250)..(1416)
attctgggagtcaccgcagccaagtttttctgccccaacttgtcggccatttctaccacactgaagctctcccacaacgtggcaggcgtcaccttcctggcatttgggaatggtgcacctgacatcttcagtgccctggtggccttctctgacccgcacacagccggcctggcccttggggcactgtttggcgctggcgtgctggttaccacagtggtggccggaggcattaccatcctacaccccttcatggctgcctccaggcccttcttcagggacatcgttttctacatggtggctgtgttcctgaccttcctcatgctcttccgtggcagggtcaccctggcatgggctctgggttacctgggcttgtatgtgttctatgtggtcactgtgattctctgcacctggatctaccaacggcaacggagaggatctctgttctgccccatgccagttactccagagatcctctcagactccgaggaggaccgggtatcttctaataccaacagctatgactacggtgatgagtaccggccgctgttcttctaccaggagaccacggctcagatcctggtccgggccctcaatcccctggattacatgaagtggagaaggaaatcagcatactggaaagccctcaaggtgttcaagctgcctgtggagttcctgctgctcctcacagtccccgtcgtggacccggacaaggatgaccagaactggaaacggcccctcaactgtctgcatctggttatcagccccctggttgtggtcctgaccctgcagtcggggacctatggtgtctatgagataggcggcctcgttcccgtctgggtcgtggtggtgatcgcaggcacagccttggcttcagtgaccttttttgccacatctgacagccagccccccaggcttcactggctctttgctttcctgggctttctgaccagcgccctgtggatcaacgcggccgccacagaggtggtgaacatcttgcggtccctgggtgtggtcttccggctgagcaacactgtgctggggctcacgctgctggcctgggggaacagcattggagatgccttctcggatttcacactggctcgccagggctacccacggatggcgttctccgcctgctttggcggcatcatcttcaacatcctcgtgggtgtggggctgggctgcctgctccagatctcccgaagccacacagaagtgaagctggagccagacggactgctggtgtgggtcctggcaggcgccctggggctcagcctcgtcttctccctggtctcagtcccattgcagtgcttccagctcagcagagtctatggcttctgcctgctcctcttctacctgaacttccttgtcgtggccctcctcactgaatttggagtgattcacctgaaaagcatgtgactgaagccgcttagtgctgtggcctcactgcaggcaggagccccgcccctcctgccgggggaggcccagggaccggagcatttctgcaaggcccttgtgggcacgagagtgcggcccttgctgctggagatctgaggtcactgctgtgagctgggagaactgctgtgtacctcttgctgccagcacccaacagccttgccgtggggaccttggaaacctggctttgctctggacaaagggttccagagagaagctagaagtcccccttgaatgacccccagagcccctctgagaagggctggagtttgggggaaggggatggctggatgtgctccaggccatgctggaggtacccccgaggcacaggcactgcccgttccccttgcctgggcttcaggccttctggcaccttctcaggacacaagtggctgcccaaccctgactcagagaatgagggtggcttggacccctgggaatcaggccgccgagggctgagctccagagccgcaccatctgccacaaacagaattcgagacatacttaattttgaatttctccttgccacgttaataaagccaaaagcagcgggtgctattcgtggcaacacacttcactgaacccacttgcttccaaaacgatgccagcccgaggcactgctacgccagcagctgccacatgggatggtggctcaggcgctccctccaggattctgcccctgcctgtccacagactcctttgtgctggaacctgggctcctccagctgccaggcaggagtcggtaggactgtgcctgtgcctccctcagcggggccctgggcggggttccaaggcctgcgagctgggaaaggacagatgaggggacctcgtgccttcttgctgtcatgcaatgaccccgccttatgttgccgaaataagcaactcttaggtttgcctgactgccttatgctggtaaagaaaagggattcaactgtctcttttccaaataaaaaaaaa

SEQ ID NO: 230 - DNA, 349 bp, Homo sapiens
  CDS (35)..(250)
atatcgtcgacccacgcgtccgcgtgctaccagaatggctgtcttagtacttcgcctgacagttgtcctgggactgcttgtcttattcctgacctgctatgcagacgacaaaccagacaagccagacgacaagccagacgactcgggcaaagacccaaagccagacttccccaaattcctaagcctcctgggcacagagatcattgagaatgcagtcgagttcatcctccgctccatgtccaggagcacgtaagcactgagaaaaacgttgctttttgtccaattctctgttgataatgaccacacaatgacctcatggcattaaaatacatgagaaacaaaaaaaaaa

SEQ ID NO: 231 - DNA, 3782 bp, Homo sapiens
  CDS (250)..(2610)
tcccgtgtcgacgatttcgtggctgccactgtggggcttctgccggccggtagtccctggcgctgctgacccagcatcggcttttctacgtcttgaacctggattcgcctaggggttgggaagggctgtggacggcgttgggggaggcctgacgagattaataaagaactcttcagaattcctggtgtttcatcatatatacgactaagatatcaactcttctagcttgctgtttctggaccaaaaaaaatgacgtctattatcaaattaactaccctttctggggtccaagaagaatctgccctttgctatcttctccaagttgatgagtttagatttttattggactgtggctgggatgagcacttttctatggatattattgattccctgaggaagcatgttcaccagattgatgcagtgctgttgtctcaccctgatcctctccaccttggtgccctcccgtatgctgtcggaaagttgggtctgaactgtgctatctatgcaaccattcctgtttataaaatgggacagatgttcatgtatgatctttatcagtctcgacacaatacagaagattttacactctttacattagatgatgtggatgcagcctttgataaaatacagcagctaaaattctctcagattgtgaatttgaaaggtaaaggacatggcctgtctatcacacctctgccagctggtcatatgataggtggaacaatatggaaaatagtcaaagatggagaagaagaaattgtttatgcagttgacttcaaccacaagagggagatccatttaaatggatgttccctggaaatgctaagcaggccttccctacttatcacagattcattcaatgctacatatgtacagcctagaagaaaacagagagatgagcagcttctgacaaatgtcctggaaacacttcgaggtgatggaaatgtgttaatagcagtggacacagcaggcagagttttggaacttgctcaacttcttgatcagatttggaggactaaagatgcaggattgggtgtttactcattggcactcctaaataatgtcagttacaatgtggtggagttttctaagtcccaggtagaatggatgagtgataaattgatgagatgttttgaagacaaaagaaataatccgtttcagtttcgccatctctctttatgtcatggtctttctgacttggcccgtgtacctagccctaaagttgtacttgccagccaacctgacctggaatgcggattttcaagggatctctttattcagtggtgtcaggaccctaaaaactcaatcattctaacctacagaactactcctgggactttagcacgtttcctaattgataatccttctgaaaaaattacagaaatagagttgaggaaacgtgtgaagcttgaagggaaagaacttgaagaatacttggaaaaagagaaactaaagaaagaagctgccaaaaagcttgagcagtcaaaagaggcagatatagattccagtgatgagagtgatattgaggaagatattgaccagccatcagctcataagacgaagcatgacttgatgatgaaaggtgaaggcagtcgtaaaggaagttttttcaaacaggcaaaaaagtcctatcctatgtttcctgccccagaagaaagaattaaatgggatgaatatggagagattatcaaagacttattatttagaccagaggatttcttagtgccagagcttcaagctactgaagaagaaaaaagcaaattagaatctggtttgacaaatggagatgaacctatggatcaggatttatctgatgttcctactaaatgtatttctacaacagagtctattgaaataaaagcccgggttacctacatagactatgaaggacgctctgatggggattccattaaaaaaatcattaatcagatgaaaccacgacagttgatcatcgtccatggcccaccagaggccagtcaagatctggcagagtgctgtcgcgcctttggtgggaaagatattaaagtgtacatgccaaagctacatgaaacagttgatgccactagtgaaactcacatctaccaggtgaggttaaaagactcacttgtcagctctcttcagttttgtaaggcaaaagatgctgaattagcttggatagatggtgtcttagatatgagagtttccaaagtggacacaggggttattttagaagaaggagaactaaaggatgatggagaagactcagagatgcaagtggaagctccctcagattctagcgttatagcacaacaaaaggccatgaaaagtctgttcggagatgatgaaaaagaaacaggtgaagaaagtgagatcattcctactttggaacccttgccacctcatgaggttcctggacatcagtcagtttttatgaatgaaccaaggctgtcagacttcaagcaagttctcttacgggaggggattcaagctgaatttgtaggaggtgtacttgtttgcaacaatcaagtagcagtccgcagaacggaaactggacgcattggattagaaggctgcctttgtcaagatttttataggataagagaccttttatatgaacaatatgccattgtataaaggacatgatgtcaagaagtatctgcttgacctttctaagaaaaagggattcttatcttactctgagcttttgatgttttgttttgtaacatacaaaaagaatctgccagaaaaacttacatgtatcagatttttaaaaatataaatagagaacattttgcaaatgctcaaatgagcattctatcttttggctttcagagtgatagagctcctaacaggtgtacaggcccaagagttgaaggtgattggttttctttacagactccttgttctctagaagggctttttacttgaataaaacaatgcaacttagcaaaccaatttatggccttagagaaacatttttgcatgagttcttacaaactgtttgttatattttctggaatgataagtgagaattatttagaaaagacatgctccaaaaaaaaaaaaaaaactgataaaacagtttttcgaaacttacttttaaaagcatacgttctatgactctctccagtttgaatatgcaattgttttcacaggcaggatgtctgttttctgcctgtatttcccagtgatttactctagggtaaggtagtacacatttggttcagaaattaatttttatttctcctatatcttgttttatcaagattttgttgtggcatttcaatgtaaattataacaccatcatttgagtatacataattcaaaagaactacttgatgcagtatagtcttaagggttctgcatacattttagaaacatcttagccgtaagttaggtcctgtgttaaactgtttagtgctctgtttttaagaaaacaaatgttgaacctcacacttttatgtggtgacagtgtaatttaattaaaaggtgtaaatgttttcatctcttaggcttgctgtctcctaaggtcacccaagcagtggttggattttatacacattactactaaaataatactgaagttggataaggttatcctttctgtatttgcgtctttcttgtgactaaccaccctgatatagtattaaccactgtgttcaagagtaaaaacaatatatgcaattttcattgaacttaaagagtgaaaaccatgtaaactattgaaactattgtaatccattaatgcttttttagaatggcagaccttgatgtttatttctcaaatggttaagccctcttct

SEQ ID NO: 232 - DNA, 1606 bp, Homo sapiens
  CDS (25)..(1290)
ggcacgaggaaaatcaagataaaaatgttcacaattaagctccttctttttattgttcctctagttatttcctccagaattgatcaagacaattcatcatttgattctctatctccagagccaaaatcaagatttgctatgttagacgatgtaaaaattttagccaatggcctccttcagttgggacatggtcttaaagactttgtccataagacgaagggccaaattaatgacatatttcaaaaactcaacatatttgatcagtctttttatgatctatcgctgcaaaccagtgaaatcaaagaagaagaaaaggaactgagaagaactacatataaactacaagtcaaaaatgaagaggtaaagaatatgtcacttgaactcaactcaaaacttgaaagcctcctagaagaaaaaattctacttcaacaaaaagtgaaatatttagaagagcaactaactaacttaattcaaaatcaacctgaaactccagaacacccagaagtaacttcacttaaaacttttgtagaaaaacaagataatagcatcaaagaccttctccagaccgtggaagaccaatataaacaattaaaccaacagcatagtcaaataaaagaaatagaaaatcagctcagaaggactagtattcaagaacccacagaaatttctctatcttccaagccaagagcaccaagaactactccctttcttcagttgaatgaaataagaaatgtaaaacatgatggtagtccatggacattaattcaacatcgaatagatggatcacaaaacttcaatgaaacgtgggagaactacaaatatggttttgggaggcttgatggagaattttggttgggcctagagaagatatactccatagtgaagcaatctaattatgttttacgaattgagttggaagactggaaagacaacaaacattatattgaatattctttttacttgggaaatcacgaaaccaactatacgctacatctagttgcgattactggcaatgtccccaatgcaatcccggaaaacaaagatttggtgttttctacttgggatcacaaagcaaaaggacacttcaactgtccagagggttattcaggaggctggtggtggcatgatgagtgtggagaaaacaacctaaatggtaaatataacaaaccaagagcaaaatctaagccagagaggagaagaggattatcttggaagtctcaaaatggaaggttatactctataaaatcaaccaaaatgttgatccatccaacagattcagaaagctttgaatgaactgaggcaaatttaaaaggcaataatttaaacattaacctcattccaagttaatgtggtctaataatctggtattaaatccttaagagaaagcttgagaaatagattttttttatcttaaagtcactgtctatttaagattaaacatacaatcacataaccttaaagaataccgtttacatttctcaatcaaaattcttataatactatttgttttaaattttgtgatgtgggaatcaattttagatggtcacaatctagattataatcaataggtgaacttattaaataacttttctaaataaaaaaaaaa

SEQ ID NO: 233 - DNA, 575 bp, Homo sapiens
  CDS (97)..(441)
  misc_feature (1)...(575): n = a,t,c or g
ccatttccccaggaccagattgacatatttcgatttaatcactcctatagggaattgncctcgaggcaagattcgcccgaggggtcttctgccatcatgccgatgttcatcgaaaacacacaggtgccccgcgcctccgtgccggacgggtccctctccgagctcacccagcagctggcgcaggccaccgcaagcccccgccagtacatcgcggtgcacgtggtcccggaccagctcatggccttcggcggctccagcgagccgtgcgcgctctgcagcctgcacagcatcggcaagatcggcggcgcgcagaaccgctcctacagcaagctgctgtgcggcctgctggccgagcgcctgcgcatcagcccggacagggtctacatcaactattacgacatgaacgcggccaatgtgggctggaacaactccaccttcgcctaagagccgcagggacccacgctgtctgcgctggctccacccgggaacccgccgcacgctgtgttctaggcccgcccaccccaaccttctggtggggagaaataaacggtttagagactaaaaaaaaaaaaaaa

SEQ ID NO: 234 - DNA, 2107 bp, Homo sapiens
  CDS (48)..(2057)
cctgcctgaggctgatcattaacccagaacttatataaagatggctcatgcgtggaatgggtatagcactgcctgcagccatggccagtacggttagccccagcaccatagctgagaccccagagccacctccattgtctgaccacatccgaaatgctgctgacatctcagtcattgtcatctattttctggtggtgatggctgttgggctgtgggcgatgctgaagaccaaccgaggtactataggaggcttcttcctcgctggtcgtgatatggcctggtggccgatgggcgcctctctctttgccagtaacatcggcagcaaccactatgtggggctggctgggacaggagcagcttcaggagtcgccaccgtaacatttgaatggacttcctcagtaatgttgctgattcttgggtggatctttgtccctatctacatcaagtcgggggtgatgaccatgccggaatatctcaagaagcggtttggtggggagcgactccaggtctacctctccatcctctccctcttcatctgtgtggttttgttaatttctgcagacatatttgctggagccatattcatcaagctggccttgggattggacctttacctggcaatcttcatcctcttggctatgactgctgtttacaccaccactgggggcttggcctcggtgatttacacagacaccctccagaccatcatcatgctgattggctcttttattctcatggggtttgcatttaacgaagttggaggttatgagagctttaccgagaagtacgtgaatgccaccccatccgtagtcgagggggacaacttgacaatcagtgccagttgctacacacctcgggcggactccttccacatcttccgagatgctgtgactggggacattccatggccaggaattatatttggaatgcccattacagctttgtggtactggtgcacaaatcaggtcattgtgcagcgctgcctgtgtggcaaggacatgtctcacgtgaaggccgcttgcattatgtgtgcttacctgaagctgctgcccatgttcctcatggtgatgccggggatgatcagccgcatcctgtacacagatatggtagcatgtgtggtaccttctgaatgcgtgaaacactgtggcgttgatgttggctgcaccaactacgcataccccacgatggtgctggaactgatgccccaaggactgcgaggcctgatgctttcggtcatgctggcctctctcatgagctccctgacctccatcttcaacagcgccagcaccctcttcaccattgacctctacaccaagatgcggaagcaagcgtcggagaaagagctcctgatagctggacggatatttgttcttctattaactgttgtgagcattgtgtgggtcccactggtacaagtttctcaaaatggacaactaatccattacacagaatcaatttctagctaccttgggcctccaattgcagctgtctttgtgcttgccatcttctgtaaaagagtcaatgaacagggagcattctggggtctaatggttggacttgcaatgggcctcattcgtatgataacagagtttgcttatggaacagggagttgcttggctcccagtaactgtcccaagattatctgtggagtgcactatctgtacttttccatcgttctcttttttgggtccatgctggtcaccctgggaatttccctcttaacaaaacccattcctgatgtacatctgtaccgcctgtgctgggttcttcggaacagtacagaggagcgaatcgatatagatgcagaagagaaaagtcaggaagaaacagatgatggtgttgaagaagattatcctgagaaatcacgtggatgcctcaagaaagcttatgacttgttctgcggtttgcagaagggacccaagctaaccaaggaggaggaggaagccttgagcaagaagctcacagacacgtctgagaggccctcgtggaggacaatagtgaacatcaacgccatcctcctcctggctgtggtggtctttattcacggctactatgcctgaactctatctgagccattagaataatgaataattcttaaaaaaaaaaa

SEQ ID NO: 235 - DNA, 2335 bp, Homo sapiens
  CDS (217)..(1182)
cacgcggagccagagccggagctgcagccagcagcgggaagccgtgggagctcaggggccgcaggagccgggccggagtgagcgcacctcgctggtggccctctggtggcagtgtgtggtgatgcgccacccgtgagtcccgctgcgcaactttcagggcgcactcggcggggctggctgcgcggctgcctgggactcggctgcgggactgcatggatggccaaggagaagcagcatctgttggacgccaggccggcaatccggtcatacacgggatctctgtggcaggaaggggctggctggattcctctgccccgacctggcctggacttgcaggccattgagctggctgcccagagcaaccatcactgccatgctcagaagggtcctgacagtcactgtgaccccaagaaggggaaggcccagcgccagctgtatgtagcctctgccatctgcctgttgttcatgatcggagaagtcgttgagatcttgggagccctggtctctgtactgtccatctgggtcgtgacgggggtactggtgtacctggctgtggagcggctgatctctggggactatgaaattgacggggggaccatgctgatcacgtcgggctgcgctgtggctgtgaacatcataatggggttgacccttcaccagtctggccatgggcacagccacggcaccaccaaccagcaggaggagaaccccagcgtccgagctgccttcatccatgtgatcggcgactttatgcagagcatgggtgtcctagtggcagcctatattttatacttcaagccagaatacaagtatgtagaccccatctgcaccttcgtcttctccatcctggtcctggggacaaccttgaccatcctgagagatgtgatcctggtgttgatggaagggacccccaagggcgttgacttcacagctgttcgtgatctgctgctgtcggtggagggggtagaagccctgcacagcctgcatatctgggcactgacggtggcccagcctgttctgtctgtccacatcgccattgctcagaatacagacgcccaggctgtgctgaagacagccagcagccgcctccaagggaagttccacttccacaccgtgaccatccagatcgaggactactcggaggacatgaaggactgtcaggcatgccagggcccctcagactgactgctcagccaggcaccaactggggcatgaacaggacctgcaggtggctggactgagtgtcccccaggcccagccaggactttgcctaccccagctgtgttataaaccaggtccccctcctgacctctgccccactccaggaatggagctcttcccagcctcccatctgactacagccagggtggggactcagcgggtataaagctagtgtgaccctgctcttccagctcctgggccagctctggaagggctgtatttgggcctaatcctcagcaaatgttctaccactcgcaggggcaaaggtggtgagccacgggacgtccaaggggaggctggccccagcgcgcccatactgcctgcctcatgccccattctcagcctggctggcctttgcctttatgaatctgagcccctccatctgcctatagcaataggcacgggggtgaggaccctcacactctcatttgagcctccctgaggcagggagccaggaggcacctgaggcctatctgtgccttagtcacttcagctatgagccaaatgttccctttcctggaggggagaggcttcttactaggtaagagacaggtttcctctttccttatttcctcagctgtgccaacacaaaaaacaactttggcacaggtggtgggcagggggtagagagatttcagcttgggttctgcactaacagcctccaagccccctggcacttctgttgccctgagagtgtcccaggggattcagagtctccagaaagatatggctgggccaactctgttgcctacctggcctgacccagtcggagcctgacatggtggagggaaagggagacaagtggggctgcactcggtccagaggccagctaggagggaaaccgcagcttcctggggcttgtgtgtgaagattcctgacttaggggtggcttttgtttacaagatgcaagaggggaaacctgtccccgactcatcgagacaacatgcccagttatcagggagtcctgtgtcacaaggtctgtctctgccattgtaagcaagtgccttgggcgagctggcctctgccccacagtctcatctgtacaccgacagggttgatgcctccctcacagggttgagaacaagagccagttggccaagtaaaaaaaaaaaaa

SEQ ID NO: 236 - DNA, 1362 bp, Homo sapiens
  CDS (54)..(1148)
caggaaagtggaaaagaactcaggtccccctacttggtgaagagtgcgcagacatggacctcgccagaaaagaatttctgcgtggaaatggcttagctgctgggaaaatgaacatcagtattgatttagacacaaactatgctgagctggttctaaatgtgggaagagtcactcttggagagaacaatagaaaaaaaatgaaggattgtcaactgagaaaacagcagaatgaaaatgtctcacgagctgtgtgtgctctgctgaattctggagggggagtgatcaaggctgaagttgagaataaaggctatagttataaaaaagatggaatagggctagatttggaaaattcttttagtaacatgctgccatttgttcctaatttcctggacttcatgcagaatggtaactactttcacatttttgtgaaatcatggagcttggaaacctctggtccgcagattgccacgttgagctccagtttgtacaagagagatgtaacgtctgcaaaagtcatgaatgcttctgctgcactggagttcctcaaagacatggaaaaaactggagggagagcatatttaagaccagaattccctgcaaaaagggcctgtgttgatgtacaagaagaaagtaacatggaagccttggctgctgatttttttaacagaacagaacttggttataaagaaaaattgacctttactgaatccacacacgttgaaataaaaaacttctcgactgaaaagttgttacaacgaattacagagattctccctcaatatgtttctgcatttgcaaatactgatggaggatatttattcgttggtctaaatgaagataaagaagtaattggctttaaagcagagaagagttatcttactaagttagaagaagtaacaaaaaattccattgggaaactgcctgtgcatcacttctgtgtggagaaggggacgataaattacttatgcaaattccttggagtatatgataaaggaaggctttgtggatatgtgtatgcactcagagtggaacgcttctgctgtgcagtgtttgctaaaaagcctgattcctggcacgtgaaagataacagagttaagcagttgaccgagaaggaatggatccagttcatggtggattcagaaccaggttgaggaaggaggattggcaataaggatacctttggcttgggtggcaggaaggttttattgtatctttgggattagggacaagattaaaagtcttcaaatttcaacatctctggtggatacaaccaatacttccctgcctcttgttttcttctgcacacttagaagatagatattccatacaataactaaatatctactcttagtagccttatct

SEQ ID NO: 237 - DNA, 1969 bp, Homo sapiens
  CDS (56)..(1915)
gtgggctgggtgggtttcctaatctggtttcgtctgcttggttcatctgtgtgcgatggctccggactcggatcccttccctgaagggccgctcttaaagctgctacccttagacgctagagaccggggcacccagcgctgccgcctgggcccggccgccctccacgccctgggcgcgcgcttgggctcggcagtgaagatctcgctacccgacggcggctcctgcctctgcactgcctggcctcggcgggacggagcggacggctttgtgcagctggacccgctgtgcgcgagccccggggcggcggtcggggcgtcgagatcccggaggagtctcagcctgaatcgcctcctcctagtgccctgtccgcccctgcggcgcgtcgccgtgtggccggtgttgcgagagcgggcaggcgcgcccggtgcccggaatacagccgcggtgctggaggcggcacaggagctgctgagaaaccgaccgatctccctgggccacgtggtggtcgctccgccaggcgctcctggcctggtggctgccttgcacatcgtcggcgggacgcccagtcccgatcccgctgggctggtcacccctcgtacccgcgtcagccttggcggggagcctccgtcggaagcccagccgcagcccgaggtgcccctgggaggtctttcggaggcggccgactcgctgcgggagctcctccgcctcccgctccgctacccgcgcgccctgaccgcgctgggcttagcggtgcctcgcggggtgctcctggcggggccccccggagtgggcaagacccagctggtgcaggccgtggcgcgcgaggcgggcgcggagctgctggcagtcagcgccccggcgctgcagggttcccggcctggggagaccgaggagaacgtgcggcgggtcttccagcgcgcccgggaactggccagccgcggacccagcctcctcttcctggacgagatggacgccttgtgtccccagcggggcagtcgagcacccgagagccgcgtagtggcccaggtgttgacgctgctggacggcgccagtggggaccgcgaggtcgtggttgtgggagccactaaccggccggacgctctagacccagcgctgcgtagacccgggagatttgaccgagaggtggtcattgggactcccacacttaaacaaagaaaggaaattctgcaagtgattacctcgaagatgcccatctccagtcatgttgatttgggccttcttgcagaaatgacagttggctatgttggtgccgacctgacagcactctgtagggaggctgccatgcatgccctccttcatagtgagaagaaccaggacaatcctgtgattgatgaaatagacttccttgaagcttttaaaaatattcagccctcatcgtttcgaagcgtcattggattaatggatatcaagcctgttgactgggaggagattggtggccttgaagatgtaaaactgaagttaaaacagagcattgagtggcctctgaaaatcccttgggaatttgttagaatgggcctgacacaaccaaagggagttctcctctatgggccccctggatgtgctaaaaccactctggtgagggccctggccacaagctgtcactgctctttcgtttcagtgagtggagctgatctgttttcaccgtttgttggagattcagaaaaagtgttgtctcagatatttcgacaagcaagagcaagcactccagcaattttgtttttggatgaaattgattcaatcttgggagctcgctcagccagcaagacaggatgtgatgttcaagaacgagttctttctgttctcctgaatgaattagatggtgttggacttaagacaatagagagaagaggaagtaaatcaagtcaacagggtaaatacaaggagctgaaaaaatgaagagagtttcaagaagtttttaaccgaagtgtcatgattattgcagcaaca

SEQ ID NO: 238 - DNA, 3225 bp, Homo sapiens
  CDS (1)..(3222)
atgaaggtgaaggaggagaaggctggggtaggaaagctggaccacactaaccacaggaggagatttccggatcagaaagaatgccctcctatccacattgggcttccagtacccacttaccctcaaagaaaaactgaccagaagggacatctttcaggcctgcaaaaagtccactggggcctgcggccagaccagccacagcaggaactgactggcccagggagtggggcaagcagccaggacagcagcatggatcttatcagcaggactcggtccccagctgctgagcagctccaggacatcctgggggaggaagatgaggctcccaaccccaccctctttacagagatggatactctgcagcatgacggagaccagatggagtggaaggagtcagccaggtggataaagtttgaagaaaaggtagaggaaggcggcgaacgctggagcaagccccacgtgtccacactatccctgcacagcctcttcgagctccgtacctgcctgcagacggggacggtgctgctggatttggacagtggctccttaccacagatcatagatgatgtcattgagaagcagattgaggatggtctcctgcggccagagctccgggagagggtcagttacgtcctcctgaggaggcaccgccaccaaaccaagaagcccatccaccgctccttagctgacattgggaagtcagtctccaccacaaatcgcagtcctgcccggagccctggtgctggcccgagtctacaccactccacggaagacctgcggatgcggcagagtgcaaattacggacgtctgtgtcatgcccagagcagaagcatgaatgacatttctctcaccccaaacacagaccagcggaaaaacaaattcatgaagaagatccccaaggactcagaagcgtccaacgtgctcgtgggcgaggtggacttcctagaccagccattcatcgcgttcgtgcgcctcatccagtcggccatgctgggaggagtgaccgaggtgcctgtccccaccagatttctgtttatactactgggaccttctgggagagcaaaatcctacaatgaaattggccgtgccattgcaaccctcatggtagatgatctcttcagtgacgtggcctacaaagcccgcaatcgggaagatctgatcgcaggaattgatgaatttctggatgaggtcatcgtccttcctcctggagaatgggacccaaatatccggattgagccccccaagaaggtgccctctgctgacaagaggaaatctgtgttctccctagcagagctgggccagatgaatggctctgtgggaggaggcggcggagctcctggaggaggcaatggaggtggtggtggtggtggcagtggcggcggggctggcagtggcggggccggcggaacaagcagcggggatgatggagagatgccagccatgcatgaaatcggggaggaacttatctggacaggaaggttcttcggtggcctgtgtctggatatcaagaggaagttgccctggttcccaagtgacttctatgatggcttccacattcagtccatctctgccatcctattcatctacctcggctgtatcaccaacgcgatcacctttggtgggcttctgggggatgccaccgacaattatcagggagtgatggagagcttcctgggcactgccatggctggctccttgttctgcctcttctcgggacagcctctcatcattctcagcagcacggggcccatcctcatctttgagaagctcctcttcgacttcagcaaaggcaatggcctggactacatggagttccgcctctggattggcctacactcagctgtccagtgccttatcctagtggccacagatgccagctttatcatcaaatatatcacccgcttcaccgaggagggcttctccacccttatcagcttcatcttcatctacgatgccatcaagaagatgatcggtgccttcaagtactaccctatcaatatggacttcaagccaaacttcatcactacctacaagtgcgagtgtgtcgcccctgacacagtgaatacaaccgtgttcaatgcttcagccccattggcaccagacaccaacgcttctctgtacaacctccttaacctcacagcgttggactggtccctgctgagcaagaaggagtgtctgagctacggcgggcgcctgcttgggaattcctgcaagtttatcccagacctggcgctcatgtccttcatccttttctttgggacatactccatgaccctgaccctgaagaagttcaaattcagccgctattttcctaccaaggtccgggccctggtggctgacttttccattgttttctccatcctgatgttctgtggaatcgatgcctgttttggcctagaaactcccaagctgcatgtgcccagtgtcatcaagccaacgcggcctgaccgaggctggttcgtggccccctttgggaagaacccgtggtgggtatacccagcaagcatcctgcccgccctgctggtgaccatcctgatcttcatggaccagcagatcactgccgtcattgtcaaccggaaggagaacaaactgaagaaggctgccggctaccatctggacctgttctgggtgggcatcctcatggctttgtgctcctttatggggctcccctggtacgtggctgccacggtcatctccatcgcccacatcgacagcctcaagatggagacagagaccagtgcccctggggagcagccccagtttctgggagtcagggaacagagagtaaccggcatcatcgtcttcatcctgacgggaatctctgtcttcctggctcccatcctaaagtgtatccccctgccggtgctgtacggagtcttcctctacatgggcgtggcctccctgaatggcatccagatggggaccggagggtcagaattcaaaatccagaagaagctgactccattctgggaacgctgcaagctcttcctgatgccagccaagcaccagccggaccatgccttcctgcggcacgtgccgctgcgccggatccacctcttcaccctggtgcagatcctctgcctggcggtgctctggatcctcaaatccacggtggctgccatcatcttcccggtcatgtctctctccaccacagatcctgggcctcatcatcgttcgaaggcttctggatttcatcttttcccagcacgacctggcctggattga

SEQ ID NO: 239 - DNA, 1100 bp, Homo sapiens
  CDS (193)..(855)
agaagggatgctgggtccagcttcctttgcgaggccttggaggggcagggggtatacaatttgccccacccataccctcataagcccaacccggcctccagcctcccttcttccccaccgagacttctctgccttgcttgagctggactataaacctctccactcctgaaggcggggccagcccccctgagcatgataaaacccaaatgggggggtctggtgtgggcacagccatggcatggccctctggcacggccctctggcaccttaccctttgccagctccatgcccagccctgtggatgcatcctcagcagacggtggcagcgggttgggttcccaccggagaaagcggaccaccttcagcaaagggcagctactggagctggagagggcgtttgcagcatggccctaccccaacatcagcacccatgagcacctggcctgggtcacttgccttcctgaggccaaggtacaggtgtggttccagaagcgctgggccaaaataatcaagaacaggaagtcaggaattctaagccctgggtctgagtgcccccagagctcctgttctcttccagacaccctccagcagccctgggatccccaaatgccaggccaacctccaccctccagcggcacacctcagcgcacctcagtgtgtcgacatagctcctgtccagctcctggcttgagtccacggcagggctgggaaggggctaaagctgtagccccatggggatcagctggggcttcagaggtccacccttctttagagcgagctactccccagacttcactaggcagcctgtctgacctcatctatgcctcggccattgtcgtcaatgtggaccactcctagtctttgtccagaacttgcaaggcccctcctctgactcctgtggcccaccctgcccctcctgggattgaacacatcagaagtggattccctggccccactttttatgcaaagggattccctacgggaaaggagtttagctcaggcatccctcccttccactggcctccaggccagcctagatgcaggtcctaagcagactggggcctggctcctgccaccccacaccctgacccctttggggg

SEQ ID NO: 240 - DNA, 1020 bp, Homo sapiens
  CDS (371)..(661)
ctagatgagcaaaatagacagagagtagctataatcagtgtagaacagacatacatctgatattgagtataaattacaagagctttggggtgatgataagcatcgtcactgaggacgttgctgaaatgaagaatgtccagtccagtgaggggcctgtcgtgggaactcggtgggaggggatgcatcctcttcactgtgaccactgccacatcctggcattccctggtcagttgaccttgaaccggctgtgcaggtccagcaggaggccagctggcttcctaggagtctttttccctctgctcactctgctgtgtttgcgggtttcctagacggaaatggagagctggatttctccacttttctgaccattatgcacatgcaaataaaacaagaagacccaaagaaagaaattcttctagccatgttgatggtggacaaggagaagaaaggttacgtcatggcgtccgacctgcggtcaaaactcacgagtctgggggagaagctcacccacaaggaaggtaacagcctgggtcctgtctcccaacagttggagggggttagggagttggaaggagggcaccaaagcctagctgatgccaccagggtggtacagaccacctctgttgatgcgcgcgcaggagactgtgagcagatgccacactaggtgggtgctggactggagcctggggaagaactagaggggctggaagggcgcagggaggtctgccagggtgaagggacagcctaggggaaacccagctcggaacccacaaggcagggcagctggagcgtgcagtctggtctccccgtgttcaagctctcactgtggggcttcatctagtgcatgacacccctgggagcacaaatgcctgctcctactgataaagaagcagggggagtgagcggctcccaagcagcggcgcaggagcgaaggcaggtctagacatccctgccctttttcccatcacagcagtctctgcagttgctgctgaggtcgagtttccgaattgaggtgctgct

SEQ ID NO: 241 - DNA, 5619 bp, Homo sapiens
  CDS (255)..(5531)
ggtcaagatgcttataaaagcgtctctactcccttaactactttggatgctacttctgataaaaagaagaaaacagtttaagctatgaagaaggacatccctcacactctgaaacagatctccttcagagacagagttttgcagcctctcatcagcttcctggatatgctcccacacctcagcctactggtctttctggaatatttgatactagtgtgaacagtgccagcagtaacactaaagagtcttcagtgatgaattttctgtctactgctgaatcccgaactgctcaggctgctgcttcaggaactactctcttaccacaattcagggctccatcctggcagacaggcatgcattcctcagcagcaactgagctgtttgttactggacctttgccaagcactggaacacttccaccatctctctctgcttatcagcatcccaccaccttcagcaatagaaactttgctaccacttcacctttggtgcttcaggattcaacttttaacactacatcaaatggaattttaagtcatcatgaccctttgctacaaatcaagacttcccagggaactgttccaactgctttggcatttgagcgcctgggcagttctgtattaagtaacagcataccacctcagtcttcaacataccgctcagctcaagagtctgcaccccatcttttacaacctcaatttagtttgttgccttcagcacttgggggatcccagcagactcctcaagcctacagttcaactctctttactagttctactgcttccattgaaagagctcttcttcgagaatgtagtgttattaaacaccatcagcggccttcaggtacccagtcaattcaggcacaactgactggttcacagcactccttacatagttatctatcaaattcaagtgtagttaattttcaggaaacaaccaggcagtcatctttatcctgtagcccaattggagattccactcaggtgagcaacggaggattacaacagaagacctcccaggtctcagtggaacttgctcagtcttactcatctgcgattccatcatcagggtatcctccttctactacaaaaataaaaagctgttctacagaacaaccactgacatcaaccaagacccctaaacctcaaagtataattcctcctgtgcaaacactaagctattccaaacctttacataatcagagttctgtaatatcgggccaagcacaaatttattctacagcgcagctaccaagccttttatcagttagtcagtcccaaaattacggtttagtacagccacataatgtgccatctattgttcattcacaggtttataggtccagcaaggttgagaaattgccacccttgtataaaacattgactttttctgggtcatctcagactataactcctgaaaatcagacgcttaattattcatctaatcagcaagaggtattgtcttcagttacaaatgagaattaccctgctcaaacaagagatctgtcttcagtaagtcagtctcaaagttactcatctggtcactctcagggtttatcaccagttagccagacacaggttagctattcatctcaatcacaagttttgtcagttgttagtctttcagaaagctatgcttcaggggagtccctaacattaacagccccttctctttcttattcttctgcctctcgggctcagaatttgccagactctagcccgacccagaattatatttctatgcattcttcccaaaatgttcagactcaagagtcatcatctccccagtcccagaagtttttgcctgctgtccagtcatcatcttttgcatcctctactcattgtcagacattacaaaataacataacttcccctgacccaaagtcttatgctgaaagaaagcttgactcagatgtgtatccatcttcaaagcaagaagatggttttccaatgcaagagttacaggtgttgcagccacaagcatctcttgagtcatcaacccaaaggctatctgatggagaaattaatgctcaagaatcaacttataaggtgtcaaaggcagatgacagatattctcagagtgtaatcagaagtaattcccgtcttgaagatcaagttattggggttgctctgcaagcatcaaaaaaaaaaaaaagtgttgttggttcagtgacacaacttaaccaacaaattggccaagtcaataatgcagctacccttgatcttaagaactcaactaatttaatacagactccacaaataaggttgaatactaaagacttaaagcagcaacatcctctcatacttaaggtgcatgagtccaaggtccaggaacagcacgatcaaataattaatgcttcatctcagattcaaattccaaatcatgctttagggcatggccatcaggcatctcttcctaatacacaggtccttttagattctgcctgtgatttacaaattcttcagcagtcaatactgcaggcaggtttaggtcaagtaaaggcatctttacaagcacagcgtgttcaaagccctcaacaaatagtacatcccttccttcagatggaaggtcatgttattcaaagcaatggtgatcattctcagcagcaactccatcctcaaaattctgaagttatgaaaatggacctctctgagtcttcaaaaccattacaacaacatctaacaacaaagggccattttagtgaaacaaatcaacatgattcaaagaatcagtttgtttctcttggatcgatgtgtttcccagaggcagtgcttcttagtgatgaaagaaatattttatcaaatgtagatgatatcttagcagctacagcagcagcttgtggagttacacctactgatttttccaagtcaacttcaaatgaaaccatgcaggctgttgaagatggtgattctaaatctcattttcagcagtcattagatgtcaggcatgtgacttcagattttaactctatgacagctacagtaggaaagccacagaatataaatgatacttccttaaatggaaatcaggttactgtgaacctttcaccagtacctgcccttcagtcaaaaatgactcttgatcaacagcacattgaaacacctggtcaaaatataccaactaaagtaacttcagcagtggttggaccaagtcatgaagtccaggagcaaagttctggcccattcaagaaacagtctgctaccaatcttgaatctgaagaagacagtgaagctcctgttgatagtacattaaataataacagaaaccaagagtttgtttctagtagtagaagtataagtggagagagtgctacatcagagagtgaatttaccttagggggtgacgacagtggtgtgtcaatgaacccagctaggagtgcacttgcactgttggccatggcccaatctggggatgcagtcagtgtcaagattgaagaagaaaaccaagatttaatgcattttaaccttcaaaagaaaagagctaaaggaaaagggcaagttaaagaggaagacaacagtaatcagaaacagctgaaaagacctgcccaaggcaaacgccagaatccaaggggaacagatatttacttaccgtatactcctccttcctcagaaagctgccatgatggttatcagcatcaagaaaaaatgagacagaagatcaaagaggtggaggaaaaacaaccggaagtcaaaacaggatttattgcttctttcttagattttctgaaatccgggcccaagcagcagttttccactcttgctgtacgaatgcctaacaggactagacggccagggacccagatggttcgtacattttgtcccccaccacttcccaagccttcatctacaacacccacacctttagtgtctgaaactggcggtaacagtccatcagataaagttgataatgaacttaaaaacttggaacatttatcttcattttcttctgatgaagatgatcctggatatagtcaagatgcttataaaagcgtctctactcccttaactactttggatgctacttctgataaaaagaagaaaacagaagccctacaggtggcaactactagcccaactgccaatactactggtactgctactacttcctcaaccactgtgggtgcagttaagcaagaacctctccactctacttcatatgcagtaaatattctggaaaatataagctcttcagaatcctcaaagcccattgaacttgatggtcttccttcagaccagtttgcaaaaggacaggacactgttgccatagaaggttttacagatgaggaggacacagaaagcggaggagaaggccaatacagagagcgtgatgaatttgtggtaaagatagaagacatagagacttttaaggaggctttaaaaacaggaaaagaacctccagctatttggaaagtacaaaaagctttattacagaaatttgttcctgaaattcgagatggtcaaagagaatttgctgctacaaatagttatcttggatattttggagatgcaaagagtaaatacaaaagaatatatgtgaagttcattgaaaatgcaaacaagaaggaatatgtcagagtgtgttctaaaaagccaagaaataaaccttcacaaactatcagaactgttcaagctaagccaagtagtagcagtaaaacttctgatcctctagcatcaaaaactacaactacaaaagccccttccgtgaaacccaaagttaaacagccaaaagtaaaggctgagccaccaccaaagaaacggaaaaaatggaaagaagaattttcatcatcccaatctgactcatctcctgagatccatactagtagtagtgacgatgaggaatttgaacctcccgctccctttgtcactcgctttttgaacacaagagcaatgaaggaaacctttaagagctacatggaattgcttgttagcattgccttggaccctgacacaatgcaagccttagagaagagcaatgatgagctacttttacctcatatgaaaaaaatagatggcatgctaaatgataaccgaaagagacttcttttgaatcttcatttggatcaatcattcaagaatgctttggaaagttttcctgaactaacaataattactcgagattctaaagcaaagagtggaggaactgctatttctaaaatcaaaatgaatggcaaagcctataataagaaaactctaaggacttctaaaacaacccccaaatctgcacaagagtttgctgtcgatccagagaaaatacagttgtattctttgtatcattcactccatcattataagtaccatgtttatctgatatgtaaggatgaggtaatttcttctcatttacttaaaaaaaatgtttttcagaatgttaaggagactctagccatagtattttggagtgttttaaagagagttgtgaaatacatgtgtgtatgtattttgtctatgtattctgtaaataatgacttgatttattgttctgagtctctctgctatgttttgtgctcagatttacccgagcctccccccctcttgtaggagctataattggtaatgttttgaagctgttggggcttgctttacatcgccataataaatgatgtttttttgcaaaaaaaaaaaa

SEQ ID NO: 242 - DNA, 1858 bp, Homo sapiens
  CDS (145)..(870)
gcccattgcgtatatcaagaaatggggggtaactttagcttgacaatagatatcccttggccggactttgaggagcatttgaagtgctttgcccaaacttaattagcgtgagaaaatggatgggggaatggaaagtatcttggcatgaataaggagctatatatgattggttgggatcgtagccaaaaccttgtggacatttgtagagagaggcaatttcaggcttttgtctgtgatgcattggcagtaccagtccgcagtgggtcttgtgatgcctgcatctccattgctgttattcatcattttgcaacagcagagcgtagagtggcagctctccaagaaattgttcgactcctgagaccaggtgggaaggcactcatttatgtctgggcaatggaacaagaatataataagcagaagtccaagtatcttagaggaaacagaaatagccaaggaaagaaagaggagatgaacagtgatacctcagtgcagaggtcacttgtggagcaaatgcgtgacatgggcagtcgagactcggcatcttctgtcccccgcattaatgactctcaggaaggaggatgtaattcaaggcaagtttctaattccaagctgcctgttcatgttaacaggacttctttttattctcaagatgtactggttccctggcaccttaagggaaatcctgataaaggcaaacctgttgagccatttggtcccataggatcccaggacccaagtcctgtgtttcatcgttactaccatgtgttccgtgagggagaactggaaggtgcctgcaggactgtgagtgatgtcagaattctgcaaagctactacgatcaaggaaactggtgtgtgattcttcaaaaggcctgattatttacctgaacacatcatatataaagaagaaatgctcacttaaaaaaaaaagagagaataaattaattacccttttaattaaagagaaaacttgtgggaaagtaccaaaggaaagctgagaaaaatttggaagtagggattcattaggagacattcaaatgtctcctgttggctgacatcacagatgtggtgttggctcctcctacttccctaggagaggtggtttctaaaagtgattgaagcagtttgtgcagtgtttgtaattcttgggtaagagcccaggattttgaagataatagttttttagtaaagtgctactaaatgtagtaaatcatgtaggattttagggatgtaattatatgttaatacagaaaatagtcctggtcaatagaaaattgtctgaagttttacctatgatttttagctctgtaaaatcatagacaataaccattctatttccatgcctgactagcccagggctggacgtatagcgggtgtccaataacgtttagtcaatcagataatacccagaacttagtaggagtttcattcaaaaactattttttgaacccaaccatgtaccagttactattttaagtactgataatgaagcagtgaataagaaagagcaaagctcttgcccttatggtgcttacattctagacggggagacagacagcaggcaaatcaataaatagatactatgtgccagatagtgataaatgccatgaaaaacataaaatgagagacgattcaccttggagcaaaagattacttttaagtgactgaaataactactaatcctgactaatttattatcaagagttaattggtattccaaattcatttgagcaggctgctaaaaacaacccaaatgtgcctccttttaacctcctttgtttaaatgacaaaagttagaatgttggtcactcagaacctaatgtgccctttagagccaaaagctgggtgtcattattgggta

SEQ ID NO: 243 - DNA, 1734 bp, Homo sapiens
  CDS (208)..(1695)
gcgagtattttccacataagctggctgtcgtttttctcctggcctctgtggaggcgagtggtctgcgggcacagctcccagaggcagccttggaattccagctcggactgggcgggaaggcgcaggcggcccaggtcgccgacacgctcacgcaccctccctgcctggccgcgcctctgcgaccaggtgacccaatgaaagaagaaaatgaaagccataaagaaaagtcttacagaagaagaatacctgtacctggacttttctcaccaaacagaaggatgcatctttcctcttcatacatctgtaactttatttctgttatcttactgtgactgtaaaatctttaaaatttgcttagttgtcaccaaagaggtgagtagagatagttcactactaagagatgacctgatccaggatgttgaaatacagattatttcaaggcaggagctcccaccaatagtccaaaattgctgtttgcctgcagtagtagaacgatcagacaatttttgtagagcaggacttgctgttgtattgagacacataatccagaaatcctatgaagcagaccccttaaagaaggaacttttggaacttctgggctttaaaaagacttgcttgaaagcctgtgctgaagttagtcagtggaccaggctatgtgaactcaccatccctttggctattgagaattttctcagagaatcttctgaccagcccccaactatacctgtagaaatactacagctagagaaaaagcttagtgagcctgttagagtgcataatgatgataaactccgcaggcagaagctcaagcaacagaaggctgatggagttgggcctccccttactaagggaaaggcaaagagcaaggtccacacacaggaaacatctgaagggttggattcttcatccaagagtctggaactgaaagtggcattctcaaagctcacagtacaggaagaaccagctactaccaacagagagccttctcacatcagaaaagcaaaagcctccgaccttccacctctggagcatgtgtttgcagaagggctttacttcactctggcagatattgtgctcttgccctgtatccatcatttcttggtaattatcagcaggaaattttccgagaagctggtagaatttccattgctagcctcttggtaccagaggattcaggaagtgccaggagtaaaaacagcagcttctaagtgtgggatccaatttctccatttaccaaagttgttgacaacctcaactgaacagcatccaaacttatgtgaagtcccaggtgtagaagagcaaagcgatcctttatttataggaggaccaagaccaaccatggccaagttaatggaaaagggcattgaagtgatgttttctccccacccttgccctacttggactcttgattggaatgttctccctgcagcagtcagcccaaaggaaggtaaaatgtccagtgatcgagctttgaggaagcagcaacagttgaacaaccttgtctatgtggtaacaaatcaggccaaacctggtgacagaattgtggatttctgcagcggtgggggccatgttggaattgtccttgctcacatgctgccatcatgtcaggttacattaatagaaaacaaggaattatcattaattcgtgctaagaagagaacaacctcattgagctgttacaaaaaaggattgatataataaataaaatatgcttagcacatcgtaaaaaaaaaa

SEQ ID NO: 244 - DNA, 1823 bp, Homo sapiens
  CDS (99)..(1820)
gcacgagtggccttacagtcgtagaactgattggctgatcatgaccatgcagttagccagggttttcccgagttgtttgggttgagttcaggagaagcatggccaggtcgagtccgtacctgcgccaacttcagggacctctgctcccacccagggatctggtggaggaggacgacgactacctaaacgacgacgtggaggaggatgaagagtccgtgttcatcgacgccgaggagctctgcagtgggggcgtaaaggctggcagcctccccgggtgcctccgcgtttctatttgtgatgaaaacacacaagagacatgtaaagtgtttggacgttttccgataacaggtgcttggtggagagtgaaggtacaagtaaagcctgtggtgggatcaaggagctatcaatatcaagttcaaggatttccgtcttactttttgcagtctgatatgtcaccaccaaatcaaaaacatatctgtgctctctttcttaaagagtgtgaggtctccagtgatgatgttaataaatttttaacatgggtaaaggaggtatcaaactacaaaaacctaaactttgaaaatcttagggaaacactaagaactttccacaaggaaactggaaggaaagatcaaaagcagcctacacagaatggtcaggaagagttgttcctagacaatgagatgagtcttcctctggaaaacacaattccatttagaaatgtaatgacagctttgcagtttccgaagataatggaattccttccagttcttctgcctcgacactttaaatggatcatagggtcaggttctaaagagatgttgaaagagatagaagagattttaggtacacatccgtggaaacttggatttagtaaaataacctacagagagtggaaactcctgcgatgtgaggcaagttggatagcattttgtcagtgtgagtctcttctccagctgatgactgatttggagaagaatgcattaataatgtattccagactgaagcagatatgtagagaagatgggcacacatatgttgaagtgaatgacttaactttgacattgtcaaatcatatgtcatttcatgctgcttcagagtctctgaagtttttgaaggatattggtgtggtgacatatgagaagtcctgtgtcttcccttatgacctttaccatgctgaaagagccatcgccttttcaatttgtgacctgatgaagaaacctccttggcatttatgtgtcgatgtcgaaaaggtgcttgcctctattcacaccacaaaacctgagaattcaagcgatgatgcattgaatgagagcaaacctgatgaagtaagattagaaaatcctgtggatgttgtggacacacaggacaatggtgaccatatttggactaatggtgaaaatgaaattaatgcagaaataagtgaagttcagctggatcaggatcaggttgaagttccactggatcgggatcaggtggctgctttggaaatgatttgctccaatcctgtgacagtcataagtgggaaaggtggatgtgggaagaccacaatcgttagacgtctttttaagcatatagagcagttggaagaaagagaagtaaaaaaagcctgtgaagattttgaacaagaccagaatgcttcagaagaatggattacctttactgagcaaagtcaactagaggcggacaaggctatagaagttttgctcacagcacctacagggaaagcagctggcttactaagacagaaaactggtcttcatgcctacacactgtgtcaggtgacattagacagttacccagtattgaacctggtaacttgctga

SEQ ID NO: 245 - DNA, 1606 bp, Homo sapiens
  CDS (63)..(1370)
tgtccctggtggcgcggctgagctacgccgtgggccacttcctcaacgacctgtgcgcgtccatgtggttcacctacctgctgctctacctgcactcggtgcgcgcctacagctcccgcggcgcggggctgctgctgctgctgggccaggtggccgacgggctgtgcacaccgctcgtgggctacgaggccgaccgcgccgccagctgctgcgcccgctacggcccgcgcaaggcctggcacctggtcggcaccgtctgcgtcctgctgtccttccccttcatcttcagcccctgcctgggctgtggggcggccacgcccgagtgggctgccctcctctactacggcccgttcatcgtgatcttccagtttggctgggcctccacacagatctcccacctcagcctcatcccggagctcgtcaccaacgaccatgagaaggtggagctcacggcactcaggtatgcgttcaccgtggtggccaacatcaccgtctacggcgccgcctggctcctgctgcacctgcagggctcgtcgcgggtggagcccacccaagacatcagcatcagcgaccagctggggggccaggacgtgcccgtgttccggaacctgtccctgctggtggtgggtgtcggcgccgtgttctcactgctattccacctgggcacccgggagaggcgccggccgcatgcggaggagccaggcgagcacacccccctgttggcccctgccacggcccagcccctgctgctctggaagcactggctccgggagccggctttctaccaggtgggcatactgtacatgaccaccaggctcatcgtgaacctgtcccagacctacatggccatgtacctcacctactcgctccacctgcccaagaagttcatcgcgaccattcccctggtgatgtacctcagcggcttcttgtcctccttcctcatgaagcccatcaacaagtgcattgggaggaacatgacctacttctcaggcctcctggtgatcctggcctttgccgcctgggtggcgctggcggagggactgggtgtggccgtgtacgcagcggctgtgctgctgggtgctggctgtgccaccatcctcgtcacctcgctggccatgacggccgacctcatcggtccccacacgaacagcggagcgttcgtgtacggctccatgagcttcttggataaggtggccaatgggctggcagtcatggccatccagagcctgcacccttgcccctcagagctctgctgcagggcctgcgtgagcttttaccactgggcgatggtggctgtgacgggcggcgtgggcgtggccgctgccctgtgtctctgtagcctcctgctgtggccgacccgcctgcgacgctgatgagacctgcacgcagtggctcacagcagcacgatttgtgacagcccgaggcggagaacaccgaacacccagtgaaggtgaggggatcagcacggcgcggccacccacgcacccacgcgctggaatgagactcagccacaaggaggtgcgaagctctgacccaggccacagtgcggatgcaccttgaggatgtcacgctcagtgagagacaccagacacagaagggtacgctg

SEQ ID NO: 246 - DNA, 2500 bp, Homo sapiens
  CDS (308)..(1015)
ctgctgcatttcggccctcgaatcgagttctcctgcaggcgctgcagattttggtgtatcctggggtgggaggctccggctctgtcagctgccgctgccctctcggagctaaaagatacctacttacagataatgtggtgaaattaaaagaatttcaacaaaagaaagtggctgttgcatgtaatctttctggcactaaaggtaccatgcagagaacaaaaatttcactttgggggagtataaatttggaccgctttttgtgaggttgtgttacgagttggatctcgaggaatctgcagtggagctcatgaaagaccagcatttacgaggtttcttctcagactccacatcattcaatattttgatggatatgttatttatcaaaggcaaatataaaagtgctttgcaagtattgatagagatgaaaaaccaagatgtgaagttcaccaaagatacctatgttcttgcttttgcaatttgctacaaactgaatagccctgagtctttcaaaatctgtactacattaagagaagaagctctactcaaaggagaaattctctccaggagagcatcctgtttcgctgtggcattagctctgaatcagaatgagatggcaaaagctgtgtccattttttctcaaatcatgaatccagaaagcatagcctgcattaatttaaatattataatccatatccagtcaaatatgttggaaaacctgataaagactctaaaaaatgctgcagaaggaaatttatcaaaatttgtgaaaagacatgtgttctcggaggaagtgctggccaaagtgagggaaaaagtgaaggatgtgcctgcccttgtggccaaatttgatgagatctatgggacactgcacatcactggccaggtcaccactgattctttggatgctgtgctctgccacacccccagggacaggaaatctcacacgttgctattaaacaagaggatggtcagccgtcgcaccttccagccactcagccagtccctgttggctgagtaaccctggtttcagtccacctatggatctgaggggcctgcttctagtgagttattacctttcctaagaagccaggtatcgcacttcagcagacagtgtgctgacacttggtcttctcctgaaattcccaaattcactgaatggtaccatgccgatctctgagaagttatgttgcaccactgtgaaggtctagatgcaagcttggctccctcagaaaggcgcttcccttttgcatggctgaggatccttgaaggaacctggtcagtctccggttcagcttccgacaccagagtggaacccagtaagcaccatcaggaatgaatttcactacaagtgtggataactctgattttcaaaggagtagttacttgcaaattacatccttgctgaattcaggaggtatgaaaccctattttaccatgttagaaaacagcccaggattttctcattgctctgccatcatatatgtctatgacttgagcccttatttttccatctgcaaaacaataatgcctatgtgtctttgcatatagatttgaaatcttcattcaaggtttagtaggatcatattttctcaaaaataagagaaataaggttcataagcaaacttgctgggattgtggttgttttgttttctcagcagcacaaacaaaaccagaatttagcctttaggactgctgagtaagccaaatttaaatgactactgctttgttcatgggtaagccatgtgcttttcaaaataagtgccactaaaaaccacataatgctttggtttctatgtggataataaatatttagtcctatagtttatcttatttgttaatgatttttctctcttgaatgcctcatattaaaaaaaaatgtgccatgagagcagttcaaagctgcttcatacttatggtctcaaatatagtatgtgttgaattttaccatgtctggtcaccagtgagcagaagatacacagtgaccccacctcacttgctccttttgtttcagaaagcccagagggttgctcagacctcaggagctgtctgccaagattgctgcagactcttcattgccacctccaaaactaagactgttcacttggttgttgttctaaggcaaggattatagagtcagaaattgtagactaggagaagtcttctgagtctcctaattaattccttcatctttcaggttaaggaaacgatccatgcaagagaggcccaatctcaactgtagactgtgtcccagtaagagagtcacagcttcaggtgtttgctgaatccaggtctgagatcacaatcccacctgaggacaggatccgcatatgagagtcgcacattggtataattgatttgtggtagagctgagattagaatccagattcctagtctagtatccttcccactgtaccacattatctcttttcagaggggaaaaaggagcagctcttaagaaacagaatactaagggcccccattactgtgtggccctgggcat

SEQ ID NO: 247 - DNA, 3054 bp, Homo sapiens
  CDS (342)..(2816)
tttcgtctacgcctttgcaggttggcgaagtggttccaggctacccggctagtctggcacggccccgtcttctgcctcctcctccgtcgcggggcggcgggaactgttggccgcgcggcctcgggaacggcccaggtccccgcccgcaggtcccgggcagataacatagatcatcagtagaaaacttcttgaagttgttcaagaaaaatttgaaagtagcaaaatagaaaataaagaattaacagcagatacagaggacagcatggaagtgttgtcttaggaaacagaacacagcagtgaaaaaacagacaaaatccgctcagatacaactgcagctgataatgttttccggcttcaatgtctttagagttgggatctcttttgtcataatgtgcattttttacatgccaacagtaaactctttaccagaactgagtcctcagaaatattttagtacattgcaaccaggaaaagcctctttagcttatttttgtcaagctgattccccaagaacatctgtatttcttgaagaactgaatgaggctgttagacctctgcaggactatggaatttcagttgccaaggttaattgtgtcaaagaagaaatatcaagatactgtggaaaagaaaaggatttgatgaaagcatatttattcaagggcaacatattgctcagagaattccctactgacaccttgtttgatgtgaatgccattgtcgcccatgttctctttgctcttctttttagtgaagtgaaatatattaccaacctggaagaccttcagaacatagaaaatgctctgaaaggaaaagcaaatattatattctcatatgtaagagccattggaataccagagcacagagcagtcatggaagccggttttgtgtatgggactacataccaatttgtcttaaccacagaaattgcccttttggaaagtattggctctgaggatgtggaatatgcacatctctacttttttcattgtaaactagtcttggacttgacccagcaatgtagaagaacactaatggaacagccattgactacactgaacattcacctgtttattaagacaatgaaagcacctctgttgactgaagttgctgaagatcctcaacaagtttcaactgtccatctccaactgggcttaccactggtttttattgttagccaacaggctacttatgaagctgatagaagaactgcagaatgggttgcttggcgtcttctgggaaaagcaggagttctactcttgttaagggactctttggaagtgaacattcctcaagatgctaatgtggtcttcaaaagagcagaagagggagttccagtggaatttttggtattacatgatgttgatttaataatatctcatgtggaaaataatatgcacattgaggaaatacaagaagatgaagacaatgacatggaaggtccagatatagatgttcaggatgatgaagtggcagaaactgttttcagagataggaagagaaaattacctttggaacttacagtggaactaacagaagaaacatttaatgcaacagtgatggcttctgacagcatagtactcttctatgctggttggcaagcagtatccatggcatttttgcaatcctatattgatgtggcagttaaactgaaaggcacatctactatgcttcttactagaataaactgtgcagattggtctgatgtatgtactaagcaaaatgttactgaatttcctatcataaagatgtacaagaaaggcgagaacccagtatcttatgctggaatgttaggaaccaaagatctcctaaaatttatccagctcaacaggatttcatatccagtgaatataacatcgatccaagaagcagaagaatatttaagtggggaattatataaagacctcatcttgtattctagtgtgtcagtattgggactatttagtccaaccatgaaaacagcaaaagaagattttagtgaagcaggaaactacctaaaaggatatgttatcactggaatttattctgaagaagatgttttgctactgtcaaccaaatatgctgcaagtcttccagccctgctgcttgccagacacacagaaggcaaaatagagagcatcccactagctagcacacatgcacaagacatagttcaaataataacagatgcactactggaaatgtttccggaaatcactgtggaaaatcttcccagttatttcagacttcagaaaccattattgattttgttcagtgatggcactgtaaatcctcaatataaaaaagcaatattgacactggtaaagcagaaatacttggattcatttactccatgctggttaaatctaaagaatactccagtggggagaggaatcttgcgggcatattttgatcctctgcctccccttcctcttcttgttttggtgaatctgcattcaggtggccaagtatttgcatttccttcagaccaggctataattgaagaaaaccttgtattgtggctgaagaaattagaagcaggactagaaaatcatatcacaattttacctgctcaagaatggaaacctcctcttccagcttatgattttctaagtatgatagatgccgcaacatctcaacgtggcactaggaaagttcccaagtgtatgaaagaaacagatgtgcaggagaatgataaggaacaacatgaagataaatcggcagtcagaaaagaaccgattgaaactctgagaataaagcattggaatagaagtaattggtttaaagaagcagaaaaatcatttagacgtgataaagagttaggatgctcaaaagtgaactaattttatagggctgtggtttccaaaatttttttggcatgatagacttaatttatttccttaaagaataatattaaatcatttcaagtttgcagactagtgccatccaatagaattataatataagtcacatattttatttaaaattttctagtaactacattaaacaaagtaaaagtgagcagggcaaaataattttgatattacttttcacccagtagtatacccaaaatagcga

SEQ ID NO: 248 - DNA, 844 bp, Homo sapiens
  CDS (267)..(599)
ggaggggtagcgattacttttcctcgtgagacacgtcccactgccttgttgcagtggcccaaggagcggaggatcgggtccacccaaagtgaggaataaatccggactttcagcaacgtgggcaggaaggagccttaaaattcccaggcaagtgggtaactctgtgcacagaccaagccgccgacgggaccatcacaaaagctttacaaggccttaccaccctggcaaatgaattagccgaaaattctggactagataacccttttatgggtctcatggaaaagtggtttggaaaatggaaaggactcctggcttcaatctttacctctcttgcaattgtaacaagtgtacttatccttgtgggctgccgcatcataccttgtattcgtgggttaactcaaaggctcatagaaacagccctcactaaagccttcctctcttctctccctccatacttggacaagctcttgctcctggataatcaagaagaacaacgaagccaaatcctgttaaaattttttgcagaggaagaagtatcaaatagaagagaggaaattgttgggacagctaagctcttcaaagactcaacttcctggtcataaacttctccccgtttttcttctttttcgccagtctaccctgtttgggaaagtttaaaccttagccagtcgggatcagctcagattgtgcagtccatccccagtcaatggggaaaggacacagaaacaggaactgcgttagggttaaaaagcccttctctcctttgtttggggtgctcttgcgattacaagctgcgcaagtagcaccgttctgaagtaaagatgccttgctgggaaaaaaaaaa

SEQ ID NO: 249 - DNA, 2908 bp, Homo sapiens
  CDS (382)..(1995)
ggggtgaacaggtcacttggatgtctcaaatggcgcagggactcggataccttacctagtgccattacagtactggagactgccagctagatccatcacacccaagtgaagctgtggaaaagcccttaaactccagagccagaaccagcaacctcagctccagaatacacttgcaaggcactggaagatctaaaattcctctttaaacaaaaagataagtaatgccccaccaacatcttttcacctcaaagtaaggtgatcccaatactagaaattttactggcaattgctctgattgttatcactattttaaccctaacttgtacaccaccaggagttccattggcagctcgttttgtgaccagtttctcttaggtcaccatgggcctgctcctgctggttctcattctcacgccttcactagcagcctaccgccatcctgatttcccgttattggaaaaagctcagcaactgctccaaagtacaggatccccttactccaccaattgctggttatgtactagctcttccactgaaacaccagggacagcttatccagcctcgcccagagaatggacaagcatagaggcggaattacatatttcctatcgatgggaccctaatctgaaaggactgatgaggcctgcaaatagtcttctttcaacagtaaagcaagatttccctgatatccgccagaaacctcccattttcggacccatctttactaatatcaacctaatgggaatagcccctatttgtgttatggccaaaaggaaaaatggaacaaatgtaggcactcttccaagtacagtctgtaatgttactttcactgtagattctaaccaacagacttaccaaacatacacccacaaccaattccgccatcaaccaagattccccaaacctccaaatattacttttcctcagggaactttgctagataaatccagccggttttgccagggacgcccaagctcatgcagtactcgaaacttctggttccggcctgctgattataaccaatgtctgcaaatttccaacctcagctctacagcggaatgggttctattggaccaaactcgaaattctcttttttgggaaaataaaaccaagggagctaaccagagccaaacaccctgcgtccaagtcttagcaggcatgactatagccaccagctacctgggcatatcagcagtctcagaattttttggaacctccctcacccccttatttcatttccatatctctacatgccttaaaactcaaggagccttttatatttgtggccagtcgattcaccaatgcctccccagtaactggactggaacttgtaccataggctatgtaaccccagacatcttcatagcccctggcaatctctctcttccaataccaatctatgggaattccccgttgcccagggtgaggagggcaatccatttcattccccttctcgcgggactcggcattctagctggtacgggaaccggaattgctggaatcacaaaagcttccctcacctatagccagctctcaaaggaaatagccaacaacattgacaccatggctaaagccttaacgaccatgcaagaacaaatcgactctttagcagccgtagtccttcaaaatcgtcgaggactagacatgttaacggcagcacagggaggaatttgtttggccttagatgaaaaatgttgcttttgggtaaatcaatcaggaaaagtacaagacaacatcagacaactcctaaatcaagcctccagtttacgggaacgagccactcagggttggttaaattgggaaggaacttggaaatggttctcttgggttcttccccttacaggcccacttgttagtctcctacttttgctcctttttggtccatgtctcctaaatctaataacccaatttgtctcctctcgccttcaggccataaagctccagacgaatctcagtgcaggacgccatcctcgcaatattcaagagtcacccttctaaggaggacccctagactgctcgctagtggaacacgacagaggcgaaatcctgccccgtctcccgtggacctggctggatatggtttttgccaatccacagagccatcctgccctgacagctagcaagaggccaagacccacagaacaaccactacagcccctctgtcagcaggaagcagttaaagaagactgaccttcgtccattttcccagataattgggtcttggactcttgagggggggaaatgttggagcaggtagctagtcagacatgagcagggcaggggagggccccctcaccaggaatgtcaggcaaccatcaggtgatggtgaggcagttgttaagctgtgtctctaacataataatgagtggcagctggcgccagggaactatggcctcccaatagataggaacacacctgaagctggtgatcagccacttcctgactaggatctcaggagctgggtgcgcaggctcaagcatgcaccctaagaggcaaactagtggcatttacctcatatatgaccttccttaggcacggcttgactggcagcggaaaaactcctccagtgatcacgtgccgacttcagtaaaaccgctggccattgctccctcccaagtgctgggcaggccctgtgcctgcgacagacgcccgaagaaactccgaggcggcgcacgtgaaccccggggccacggccatgggtaaaacccaagtaagggccacagcgcatggggcctacaaagtacccgcgagccccaaaaggggacaggacacatgagtatgcgctaaaactaaaccggagaaaaatgctgtggaacaagaccaaaagcgcgacaaatagcacctcgggacaacaccgtgcgacacgaaagtaagagaaaccacacagtagcaacaaacgcgtgatgaa

SEQ ID NO: 250 - DNA, 3981 bp, Homo sapiens
  CDS (297)..(1118)
cggacagtaaggatcatgtgtttcccgtgaatgacggctttcaggctctgcaaggcatcatccactcaattttgaagaagtcctgcatcgaaattctagcagctgaaccatccaccatatgtgcaggagagtcatttcaagttgtcgtgagaggaaacggcttccgacatgcccgcaacgtggacagggtcctctgcagcttcaagatcaatgactcggtcacactcaatgagaagcccttttctgtggaagatacttatttactgtgtccagcgcctatcttaaaagaagttggcatgaaagctgcactccaggtcagcatgaacgatggcctctcttttatctccagttctgtcatcatcaccaccacacactgttctgacggttccatcctggccatcgccctgctgatcctgttcctgctcctagccctggctctcctctggtggttctggcccctctgctgcactgtgattatcaaggaggtccctccaccccctgccgaggagagtgaggaagaagatgatgatggtctgcctaagaaaaagtggccaacggtagacgcctcttattatggtgggagaggcgttggaggcattaaaagaatggaggttcgttggggagaaaagggctccacagaagaaggtgctaagttggaaaaggcaaagaatgcaagagtcaagatgccggagcaggaatatgaattccctgagccgcgaaatctcaacaacaatatgcgtcggccttcttccccccggaagtggtactctccaatcaagggaaaactcgatgccttgtgggtcctactgaggaaaggatatgatcgtgtgtctgtgatgcgtccacagccaggagacacggggcgctgcatcaacttcaccagggtcaagaacaaccagccagccaagtacccactcaacaacgcctaccacacctcctcgccgcctcctgcccccatctacactcccccacctcctgcaccccactgccctcccccgccccccagcgcccctacccctcccatcccgtccccaccttccacccttccccctcctccccaggctccacctcccaacagggcacctcctccctcccgccctcctccaaggccttctgtctagagcccaaagttcctgctctgggctctctcagaaacttcaggagatgttagaacaagtctttccagttagagaagaggagtggtgataaagcccactgaccttcacacattctaaaaattggttggcaatgccagtataccaacaatcatgatcagctgaaagaaacagatattttaaattgccagaaaacaaatgatgaggcaactacagtcagatttatagccagccatctatcacctctagaaggttccagagacagtgaaactgcaagatgctctcaacaggattatgtctcatggagaccagtaagaaaatcatttatctgaaggtgaaatgcagagttggataagaaatacattgctgggtttctaaaatgctgccttcctgcctctactccacctccatccctggactttggacccttggcctaggagcctaaggaccttcacccctgtgcaccacccaagaaagaggaaaactttgcctacaactttggaaatgctggggtccctggtgtggtaagaaactcaacatcagacgggtatgcagaaggatgttcttctgggatttgcaggtacataaaaaatgtatggcatcttttccttgcaaattcttccagtttccaagtgagaaggggagcaggtgtttactgatggaaaaggtatgttgctatgttgatgtgtaagtgaaatcagttgtgtgcaatagacaggggcgtattcatgggagcatcagccagtttctaaaacccacaggccatcagcagctagaggtggctggctttggccagacatggaccctaaatcaacagacaatggcattgtcgaagagcaacctgttaatgaatcatgttaaaaatcaaggtttggcttcagtttaaatcacttgaggtatgaagtttatcctgttttccagagataaacataagttgatcttcccaaaataccatcattaggacctatcacacaatatcactagttttttttgtttgtttgttttttgttttttttcttggtaaagccatgcaccacagacttctgggcagagctgagagacaatggtcctgacataataaggatctttgattaacccccataaggcatgtgtgtgtatacaaatatacttctctttggcttttcgacatagaacctcagctgttaaccaaggggaaatacatcagatctgcaacacagaaatgctctgcctgaaatttccaccatgcctaggactcaccccatttatccaggtctttctggatctgtttaatcaataagccctataatcacttgctaaacactgggcttcatcacccagggataaaaacagagatcattgtcttggacctcctgcatcagcctattcaaaattatctctctctctagctttccacaaatcctaaaattcctgtcccaagccacccaaattctcagatcttttctggaacaaggcagaatataaaataaatatacatttagtggcttgggctatggtctccaaagatccttcaaaaatacatcaagccagcttcattcactcactttacttagaacagagatataagggcctgggatgcatttattttatcaataccaatttttgtggccatggcagacattgctaatcaatcacagcactatttcctattaagcccactgatttcttcacaatccttctcaaattacaattccaaagagccgccactcaacagtcagatgaacccaacagtcagatgagagaaatgaaccctacttgctatctctatcttagaaagcaaaaacaaacaggagtttccagggagaatgggaaagccagggggcataaaaggtacagtcaggggaaaatagatctaggcagagtgccttagtcagggaccacgggcgctgaatctgcagtgccaacaccaaactgacacatctccaggtgtacctccaaccctagccttctcccacagctgcctacaacagagtctcccagccttctcagagagctaaaaccagaaatttccagactcatgaaagcaaccccccagcctctccccaaccctgccgcattgtctaatttttagaacactaggcttcttctttcatgtagttcctcataagcaggggccagaatatctcagccacctgcagtgacattgctggacccctgaaaaccattccataggagaatgggttccccaggctcacagtgtagagacattgagcccatcacaactgttttgactgctggcagtctaaaacagtccacccaccccatggcactgccgcgtgattcccgcggccattcagaagttcaagccgagatgctgacgttgctgagcaacgagatggtgagcatcagtgcaaatgcaccattcagcacatcagtcatatgcccagtgcagttacaagatgttgtttcggcaaagcattttgatggaatagggaactgcaaatgtatgatgattttgaaaaggctcagcaggatttgttcttaaaccgactcagtgtgtcatccccggttatttagaattacagttaagaaggagaaacttctataagactgtatgaacaaggtgatatcttcatagtgggctattacaggcaggaaaatgttttaactggtttacaaaatccatcaatacttgtgtcattccctgtaaaaggcaggagacatgtgattatgatcaggaaactgcacaaaattattgttttcagcccccgtgttattgtccttttgaactgtttttttttttattaaagccaaatttgtgttgtatatattcgtattccatgtgttagatggaagcatttcctatccagtgtgaataaaaagaacagttgtagtaaattattataaaaaaaaaaagaaaaaaaaa

SEQ ID NO: 251 - DNA, 1104 bp, Homo sapiens
  CDS (281)..(649)
acgccaagcttggcacgagggcaggagaggggacctagatgggcaggcagccctgcaccgtctccttggagtccagccacagggcggagccggtggggtcggacccacagaacgaccgacggaccgagggttcgagggagggacacggaccaggaacctgagctaggtcaaagacgcccgggccaggtgccccgtcgcaggtgcccctggccggagatgcggtaggaggggcgagcgcgagaagccccttcctcggcgctgccaacccgccacccagcccatggcgaaccccgggctggggctgcttctggcgctgggcctgccgttcctgctggcccgctggggccgagcctgggggcaaatacagaccacttctgcaaatgagaatagcactgttttgccttcatccaccagctccagctccgatggcaacctgcgtccagaagccatcactgctatcatcgtggtcttctccctcttggctgccttgctcctggctgtggggctggcactgttggtgcggaagcttcgggagaagcggcagacggagggcacctaccggcccagtagcgaggagcagttctcccatgcagccgaggcccgggcccctcaggactccaaggagacggtgcagggctgcctgcccatctaggtcccctctcctgcatctgtctcccttcattgctgtgtgaccttggggaaaggcagtgccctctctgggcagtcagatccacccagtgcttaatagcagggaagaaggtacttcaaagactctgcccctgaggtcaagagaggatggggctattcactctcatcatactctctactacacataagacacgaaaacgtacaacacaccaacccacaacggcaccccgcctcaacatattccctgcagaggggcaacaaccctcacgcaccgtcacaacaccatcctgcatacacaactgcgtccacccaatgccaccgacatcacacgagtaagcacttgacaccctccacacccgcgctgaacgtgcacacagcacaaagctgaacttggcgaacgacactacacagagctgcaccaatctcacaccactcacacacaaatctaaaggaata

SEQ ID NO: 252 - DNA, 1181 bp, Homo sapiens
  CDS (148)..(726)
ctgcctttcaggtagtaggcagtgcaggaaggggcaggtttactgctgaacgtaaaaggggctgggctccaaagatggtcggtcaaccagcgtactcctgtgccgagcaggaggttcctgggcactggcattctgtagaagagtgggatgtggactttgttgtgccctgatcggggcccctttggctggtccttaaccctgctttcattgctgtctttcagggtaaaggcagcagtaatgctaacgctagcaagtaaactgaagcgtgacgatggtctcaaagggtcccggacggcagccacagcgtccgactcgactcggagggtttctgtgagagacaaattgcttgttaaagaggttgcagaacttgaagctaatttaccttatgagggttactaccagggtggaaaatttcagtttgaaactgaagttcccgatgcgtacaacatggtgcctcccaaagtgaaatgcctgaccaagatctggcaccccaacatcacagagacaggggaaatatgtctgagtttattgagagaacattcaattgatggcactggctgggctcccacaagaacattaaaggatgtcgtttggggattaaactctttgtttactgatcttttgaattttgatgatccactgaatattgaagctgcagaacatcatttgcgggacaaggaggacttccggaataaagtggatgactacatcaaacgttatgccagatgataaaaggggacgattgcaggcccatggactgtgttacagtttgtctctaacatgaaacagcaagaggtagccccctctcccgtcctcatgctccctctcagtcccctggattgccccagtcctgtgaccatgttgccctgaagaagaccatcttcatgactgctcattgtagatggagaattcaacataaatacagcaagaaaatgtgtttgggcttctgaagagttgtctgcttaccttaacatgtttacttttttgaacttgtactgtataggctgttggtgaaattcttaagaagttgtaatgaactcaaaattgaggccagagcttgctttcccttttcccaaacaaaattggttttctgcacaagcgatgctaatgatgtgttcagtgtaactcgcagattggcaataagatacccgctacaaactgtgaaaaaaaaaaaaaaaaaa

SEQ ID NO: 253 - DNA, 768 bp, Homo sapiens
  CDS (105)..(230)
attagcatgattccaatattaaaaaaaatggaccagaggagattctctctcctgtcctatcctcagcacccagttcccctccccacaggcctctcaggtgttacatgctgataactatgtacatgtattccttaaatgtttttttaagttttatattcttggcactggtcttcaaatgtgtacatgtgtgccagggagcaaatgccttcttgtttctgaaattggtcttttagactgttcttttttcccatcttctcacctcctgcccctccttcagggtacttccgtggccagaacccctccaggtcagaggcagaagagaagcctcatgggtcacagcagcagatgtgggctggagatctattcatttggttttggcttgaattttctgaatggtttacttgatcttgggaaagatatatcttgccaggaaaaatgataggccttgacaatgttgaatgatcctgcaccaccttgaaagacattttctaatatggtttgtcaggcaaagtggttagtagtcatttgtggcctgaggtagaagtcctcagaaatcagcagacttcactgataaaatgctgacttgcccctggactgggctctgtgagagtggccttctgcactgtgcacagtaggtgtgaacacaccacacctacagggaccacgtggtgggctgtggactagcggccaagctccctgcaggcccactaatagaattcagcttttagcatgggctgtttcatactgttctgatgaacgaaatcgtcg

SEQ ID NO: 254 - DNA, 1251 bp, Homo sapiens
  CDS (1)..(1248)
atggagtcctcacccatcccccagtcatcagggaactcttccactttggggagggtccctcaaaccccaggtccctctactgccagtggggtcccggaggtggggctacgggatgttgcttcggaatctgtggccctcttcttcatgctcctgctggacttgactgctgtggctggcaatgccgctgtgatggccgtgatcgccaagacgcctgccctccgaaaatttgtcttcgtcttccacctctgcctggtggacctgctggctgccctgaccctcatgcccctggccatgctctccagctctgccctctttgaccacgccctctttggggaggtggcctgccgcctctacttgtttctgagcgtgtgctttgtcagcctggccatcctctcggtgtcagccatcaatgtggagcgctactattacgtagtccaccccatgcgctacgaggtgcgcatgacgctggggctggtggcctctgtgctgtggagccacagtgcctactgccagctttttgtggtggtctttgctgtcctttactttctgttgcccctgctcctcatacttgtggtctactgcagcatgttccgagtggcccgcgtggctgccatgcagcacgggccgctgcccacgtggatggagacaccccggcaacgctccgaatctctcagcagccgctccacgatggtcaccagctcaggggccccccagaccaccccacaccggacgtttgggggagggaaagcagcagtggttctcctggctgtggggggacagttcctgctctgttggttgccctacttctctttccacctctatgttgccctgagtgctcagcccatttcaactgggcaggtggagagtgtggtcacctggattggctacttttgcttcacttccaaccctttcttctatggatgtctcaaccggcagatccggggggagctcagcaagcagtttgtctgcttcttcaagccagctccagaggaggagctgaggctgcctagccgggagggctccattgaggagaacttcctgcagttccttcaggggactggctgtccttctgagtcctgggtttcccgacccctacccagccccaagcaggagccacctgctgttgactttcgaatcccaggccagatagctgaggagacctctgagttcctggagcagcaactcaccagcgacatcatcatgtcagacagctacctccgtcctgccgcctcaccccggctggagtcatga

SEQ ID NO: 255 - DNA, 1356 bp, Homo sapiens
  CDS (1)..(1353)
atggagtcctcacccatcccccagtcatcagggaactcttccactttggggagggtccctcaaaccccaggtccctctactgccagtggggtcccggaggtggggctacgggatgttgcttcggaatctgtggccctcttcttcatgctcctgctggacttgactgctgtggctggcaatgccgctgtgatggccgtgatcgccaagacgcctgccctccgaaaatttgtcttcgtcttccacctctgcctggtggacctgctggctgccctgaccctcatgcccctggccatgctctccagctctgccctctttgaccacgccctctttggggaggtggcctgccgcctctacttgtttctgagcgtgtgctttgtcagcctggccatcctctcggtgtcagccatcaatgtggagcgctactattacgtagtccaccccatgcgctacgaggtgcgcatgacgctggggctggtggcctctgtgctggtgggtgtgtgggtgaaggccttggccatggcttctgtgccagtgttgggaagggtctcctgggaggaaggagctcccagtgtccccccaggctgttcactccagtggagccacagtgcctactgccagctttttgtggtggtctttgctgtcctttactttctgttgcccctgctcctcatacttgtggtctactgcagcatgttccgagtggcccgcgtggctgccatgcagcacgggccgctgcccacgtggatggagacaccccggcaacgctccgaatctctcagcagccgctccacgatggtcaccagctcaggggccccccagaccaccccacaccggacgtttgggggagggaaagcagcagtggttctcctggctgtggggggacagttcctgctctgttggttgccctacttctctttccacctctatgttgccctgagtgctcagcccatttcaactgggcaggtggagagtgtggtcacctggattggctacttttgcttcacttccaaccctttcttctatggatgtctcaaccggcagatccggggggagctcagcaagcagtttgtctgcttcttcaagccagctccagaggaggagctgaggctgcctagccgggagggctccattgaggagaacttcctgcagttccttcaggggactggctgtccttctgagtcctgggtttcccgacccctacccagccccaagcaggagccacctgctgttgactttcgaatcccaggccagatagctgaggagacctctgagttcctggagcagcaactcaccagcgacatcatcatgtcagacagctacctccgtcctgccgcctcaccccggctggagtcatga

SEQ ID NO: 256 - DNA, 2299 bp, Homo sapiens
  CDS (314)..(2260)
actgctaggcgaggagagggaagggggcggaggagacagggctactgcaggcgcagagctgggggcagccgggggcccgagtggctgaggctggtcccgcagcggccgcttgccggcgttctggctcctgtggcctcaccaggaagcgtcagagtcccgacactggggaagctcggagcgccgcctccgctgccgccgcctcctgcctggctctgggtccccgagccccctcccctggcccagcccgactccctcctccttcccgaaccatccggctcgggctccttccctggcgatggctggccgctgagccatggctcagtacggccaccccagtccgctcggcatggctgcgagagaggagctgtacagcaaagtcaccccccggaggaaccgccaacagcgccccggcaccatcaagcatggatcggcgctggacgtgctcctctccatggggttccccagagcccgcgcacaaaaagccttggcatccacgggaggaagaagtgttcaggcagcatgtgactggttattctcccatgtcggtgaccccttcctggatgaccccctgccccgggagtacgtcctctacctccgtcccaccggccccttagcacagaagctttccgacttttggcagcagtcgaagcagatctgcgggaagaacaaggcacacaacatcttcccccacatcacactctgccagttctttatgtgcgaggacagcaaggtggatgccctgggggaagccctgcagaccacggtcagtcgctggaaatgtaagttctcggccccgctgcccctggagctctatacgtcgtccaacttcatcggcctctttgtaaaggaagacagtgcggaggtcctcaagaagtttgctgctgactttgctgcagaggctgcatccaaaaccgaagtgcatgtggaacctcataagaagcagctacatgtgaccctggcttaccacttccaagccagccacctacccaccctagagaaactggcccagaacattgacgtcaagctagggtgtgactgggtggctaccatattttctcgggatatccgatttgctaaccatgagacattacaggtcatctacccctataccccacaaaatgacgatgagctggagctggtccccggggacttcatcttcatgtctccaatggagcagaccagcaccagcgagggttggatctatggcacgtccttaaccaccggctgctctggactcctgcctgagaattacattaccaaggctgatgaatgcagcacctggatatttcatggttcttattcaatcttaaatacatcgtcatccaactctctcacgtttggggatggagtattggagaggcggccttatgaggaccaggggctcggggagacgactcctcttactatcatctgccagcccatgcagccgctgagggtcaacagccagcccggcccccagaagcgatgcctttttgtgtgtcggcatggtgagaggatggatgttgtgtttgggaagtactggctgtcccagtgcttcgatgccaaaggccgctacatacgcaccaacctgaacatgcctcatagtttacctcagcggagtggtggtttccgagattacgagaaagatgctcccatcactgtgtttggatgcatgcaagcaagactagtgggtgaagccttattagagagcaataccattatcgatcatgtctattgctccccgtcccttcgctgcgttcagactgcacacaatatcttgaaaggtttacaacaagaaaatcacttgaagatccgtgtagagcccggcttatttgagtggacaaaatgggttgctgggagcacattacctgcatggatacctccatcagagttagctgcagccaacctgagtgttgatacaacctacagacctcacattccaatcagcaaattagttgtttcagaatcctatgatacttatatcagtagaagtttccaagtaacaaaagaaataataagtgaatgtaaaagtaaaggaaataacatcctgattgtggcccacgcatcttcccttgaagcgtgtacctgccaacttcagggcctgtcacctcagaactccaaggacttcgtacaaatggtccgaaagatcccatatctgggattttgttcctgtgaagaattaggagaaactggaatatggcagctgacagatccaccaatccttcctcttacccatggaccaactgggggcttcaactggagagagaccttgcttcaagaataaaccacaccagtgaacaagaaggaaaaaaaaaaaaaa

SEQ ID NO: 257 - DNA, 1467 bp, Homo sapiens
  CDS (60)..(851)
atcttagctgtagatagaggcggcaacctcggaagtgcggagcgggtgggcctatatagatgttgaggtgcggaggccgtgggcttttgttgggcctggctgtagccgcagcagcggtaatggcagcacggcttatgggctggtggggtccccgcgctggctttcgccttttcataccggaggagctgtctcgctaccgcggcggcccaggggacccgggcctgtacttggcgttgctcggccgtgtctacgatgtgtcctccggccggaggcactacgagcctgggtcccactatagcggcttcgcaggccgagacgcatccagagctttcgtgaccggggactgttctgaagcaggcctcgtggatgacgtatccgacctgtcagccgctgagatgctgacacttcacaattggctttcattctatgagaagaattatgtgtgtgttgggagggtgacaggacggttctacggagaggatgggctgcccaccccggcactgacccaggtagaagctgcgatcaccagaggcttggaggccaacaaactacagctgcaagagaagcagacattcccgccgtgcaacgcggagtggagctcagccaggggcagccggctctggtgctcccagaagagtggaggtgtgagcagagactggattggcgtccccaggaagctgtataagccaggtgctaaggagccccgctgcgtgtgtgtgagaaccaccggcccccctagtggccagatgccggacaaccctccacacagaaatcgtggggacctggaccacccaaacttggcagagtacacaggctgcccaccgctagccatcacatgctcctttccactctaagccgtagcctcttctgttaataacacacagagagctctgccaagcacctgagtaggcccttgacacttgtgtgccctgggatgcctcctggcgcgaatcaggaggttctggaaggactctggctatattctgcaaatgtggctcatgccccttaccgtggctcggcgttgtggtgcctgagggacagccggccacctgcccattactggtcagcttttcaacactattccctttgacctactggccatcttcctcacagccctcagatatcaacgggcacaaataagaccaactcaatttccacttgaatttacaaccaaaagcctgctgagttgattacagctgggccaatacagtacgaggcaataacaaattagtgtgggttgattctggaattggaaaagcttttgcttgtatggatacagcaaatccagatgtctctgaacaaagcaacaatttaaagcaacgacattttctgtcctttaagcacttaaaatcaggtgtggtgtgttttcaaaggcagaagtctgcattttgagcaaaaggtggcttcccagctctaacaaggtaactggttagcatgacattaaagcttgggcaaggcttcaaactt

SEQ ID NO: 258 - DNA, 2103 bp, Homo sapiens
  CDS (1184)..(1303)
agtggccagagcgactcttcagggaggtggcaggaaaggcttggaacagctgccggaggtgacggagcggcggccccgcccggtgcgctggaggtcgaagcttccaggtagcggcccgcagagcctgacccaggctctggacatcctgagcccaagtcccccacactcagtgcagtgatgagtgcggaagtgaaggtgacagggcagaaccaggagcaatttctgctcctagccaagtcggccaagggggcagcgctggccacactcatccatcaggtgctggaggcccctggtgtctacgtgtttggagaactgctggacatgcccaatgttagagagctggctgagagtgactttgcctctaccttccggctgctcacagtgtttgcttatgggacatacgctgactacttagctgaagcccggaatcttcctccactaacagaggctcagaagaataagcttcgacacctctcagttgtcaccctggctgctaaagtaaagtgtatcccatatgcagtgttgctggaggctcttgccctgcgtaatgtgcggcagctggaagaccttgtgattgaggctgtgtatgctgacgtgcttcgtggctccctggaccagcgcaaccagcggctcgaggttgactacagcatcgggcgggacatccagcgccaggacctcagtgccattgcccgaaccctgcaggaatggtgtgtgggctgtgaggtcgtgctgtcaggcattgaggagcaggtgagccgtgccaaccaacacaaggagcagcagctgggcctgaagcagcagattgagagtgaggttgccaaccttaaaaaaaccattaaagttacgacggcagcagcagccgcagccacatctcaggaccctgagcaacacctgactgagctgagggaaccagctcctggcaccaaccagcgccagcccagcaagaaagcctcaaagggcaaggggctccgagggagcgccaagatttggtccaagtcgaattgaaagaactgtcgtttcctccctggggatgtggggtcccagctgcctgcctgcctcttaggagtcctcagagagccttctgtgcccctggccagctgataatcctaggttcatgacccttcacctcccctaaccccaaacatagatcacaccttctctagggaggagtcaaatgtaggtcatgtttttgttggtactttctgttttttgtgacttcatgtgttccattgctccccgctgccatgctctctcccttgtttccttaagagctcagcatctgtccctgttcattacatgtcattgagtaggtgggtagccctgatgggggtcgctctgtctggagcataacccacaggcgttttttctgccaccccatccctgcatgcctgatccccagttcctataccctacccctgacctattgagcagcctctgaagagccatagggcccccacctttactcacaccctgagaattctgggagccagtctgccatgccaggagtcactggacatgttcatcctagaatcctgtcacactacagtcatttcttttcctctctctggcccttgggtcctgggaatgctgctgcttcaaccccagagcctaagaatggcagccgtttcttaacatgttgagagatgattctttcttggccctggccatctcgggaagcttgatggcaatcctggaagggtttaatctccttttgtgagtttggtggggaagggaagggtatatagattgtattaaaaaaaaaaaggtatatatgcatatatctatatataataggagcaaattattcttgagaattctccaaacacaggacaaacaaaaatgtgtgggcgccgcgccccaaaaggtcgcaaccatccggggggccgggcccacggtgagacatggccaagggtctaggaaactggcagcatgggtgttccccaacaacccggggacgagctgaccccgggctgcgccgggtcacggcagcccacacaccgcggcgcaagacgagcacgaagcccgacagacggagcaaccacctcagcagagacacagaacgaatagggacgagcaaaaaagcagacgaacaagaacaaaata

SEQ ID NO: 259 - DNA, 845 bp, Homo sapiens
  CDS (50)..(379)
gcacgagggagagtactgagaagcgtcggggagcgcaggcccaacagccatggcggtggaaggaggaatgaagtgtgtcaagtttttgctctacgttctcctgctggccttctgcgcctgtgcagtgggattgatcgccattggtgtagcggttcaggttgtcttgaagcaggccattacccatgagactactgctggctcgctgttgcctgtggtcatcattgcagtgggtgccttcctcttcctggtggcctttgtgggctgctgtggggcctgcaaggagaactactgtctcatgattacatttgccatcttcctgtctcttatcatgcttgtggaggtggctgtggcattgctggctatgtgtttagagaccaggtgaagtcagagtttaataaaagcttccagcagcagatgcagaattaccttaaagacaacaaaacagccactattttggacaaattgcagaaagaaaataactgctgtggagcttctaactacacagactgggaaaacatccccggcatggccaaggacagagtccccgattcttgctgcatcaacataactgtgggctgtgggaatgatttcaaggaatccactatccatacccagggctgcgtggagactatagcaatatggctaaggaagaacatactgctggtggctgcagcggccctgggcattgcttttgtggaggtcttgggaattatcttctcctgctgtctggtgaagagtattcgaagtggctatgaagtaatgtaggggtggggggcgtttggtcttttcatggagtggattctccaggtttttcaattaaacggattattttttcagacctaaaa

SEQ ID NO: 260 - DNA, 3725 bp, Homo sapiens
  CDS (718)..(2778)
agacaatgagggagagtctccgccgaccgcctgctgcttattgttccgggactggagactgcagccggctgctgcctagtcctccggggctccgctcctgactagctcctccgtccctctagggacggttcggggtcacctaaccctggtccccggggcgctgggacgctagccccaagccgcagccgctcttcgctgaccgccctctttctgctttgcaggtcggcagcttcactcccgagggtgccgcgagcccaggcggcgaacacccggtacccctggcgcagcgaggtgggatgctgtacggacagcagcgctaagtgcccccccacccccggcgcagggtgcactcgctcctggccgcgggcccagcggcggcggcggcggcggcggcggaggggatgagcccgggacgcgcgaggcgcctgcctcaagctaccgcccggagagggacgccgagtagggctcatcgcagtaccgcgcggacccctgccccctgtggcacgcggctgcggagccttgaagccgtgtctgtgatcaggatgcactgggcgcctcgcagctggtgaggatgccctgctgcgcggccctgcgcccccagccccagtcccaggtgggcaagactgactgggcccggcttcggcccctcgtgccggtggatgaaacgtgccggagtgcttgggtgccatcagctatcaaatctgaattctaagcgccatggacgaaggcactggactgcagcccggggcgggagagcagctggaggcgccggccactgcagaagctgtccaagagaggtgcgagccggagaccctcaggtctaagagtttaccggtcctcagcagcgcctcctgccggccaagcctcagtcccactagtggagacgccaacccggcctttggctgtgtggattcttcgggccaccaggagttgaagcaaggcccgaacccgttggcccccagtccctctgccccgtccacttcggcggggctcggggactgtaaccacagggtggacctcagcaaaaccttctcggtgtcctccgccttggccatgctccaggagagaaggtgcctctacgtggtcctcacggattcccgttgcttcctggtgtgcatgtgctttctgaccttcatccaggcgttaatggtctctgggtacctgagcagcgtaattaccaccattgaaaggcgctacagtctgaagagttccgagtcggggctgctggtcagctgctttgacatcgggaacctggtggtggtggtgttcgtcagctacttcggcggccggggtcggcggcccctgtggctggccgtgggtggactcctcatcgccttcggggcagccctcttcgccttacctcacttcatctcgcccccctaccagatccaagagttgaacgcctcggcccccaacgacggcctgtgtcagggtggcaactccaccgccactttggagcctccggcctgtccgaaggactcgggaggaaataatcactgggtctacgtggctttattcatttgcgcgcagattctcattggaatgggctccacacctatttataccctgggaccaacctacttagatgacaatgtcaagaaagaaaactcctccttgtacctagccatcatgtatgtcatgggagcacttggccctgcagtgggatatttattaggtggacttcttattggtttttatgttgatcccagaaatcctgttcaccttgaccagaatgaccctcgtttcattggaaactggtggagtggattcctcctttgtgccattgcaatgtttcttgtgatattcccaatgtttactttcccaaaaaagcttccacctcgacacaagaaaaagaaaaagaaaaaattttctgttgatgctgttagtgatgacgatgttctgaaggagaaatcaaacaacagtgaacaagcggacaaaaaagtttcttcgatgggatttggaaaggatgtcagagacctaccaagagcagctgtcaggatcttaagcaacatgacattcctttttgtgagtttgtcatacacagctgagagtgccattgtaactgctttcattaccttcattcccgagttcatcgagtcacagtttggtatcccagcctccaatgccagcatctacactggggttattatcgtccccagtgctggtgttggtattgtcctcggaggctacattataaaaaaattgaaacttggtgccagagaatctgcaaaactagcaatgatctgcagtggtgtgtctttactatgtttttcaaccctatttattgttggatgtgaaagcattaatctagggggcataaacatcccttatacaacaggaccttctctcaccatgccccataggaatctgacaggaagctgcaacgttaattgtggttgtaaaatacacgagtatgagccagtctgtggatcagatggaattacatactttaacccttgtctggctggctgtgttaatagtggtaatcttagcactgggatacggaattatacagaatgcacctgtgtccaaagtcgccaagtgatcactccacccaccgtgggacagcgaagtcagctccgtgtggttattgtcaagacttatctcaatgagaacggctatgctgtgtctgggaaatgtaaacggacctgcaatactcttatcccattcttagtttttcttttcatagtcaccttcatcacagcatgtgcccaaccatcagctatcatagtaacactcagcatacattcctactccaatctactttggagcagtcattgacaccacctgcatgctctggcaacaggaatgtggtgtgcagggttcttgctgggagtacaacgtgacgtcgtttcgttttgtgtattttggtttggctgccggcctcaaattcgttgggtttatttttatttttctggcctggtactccataaaatacaaggaggatggactgcagaggcggaggcagagagaatttcccctgagcaccgtgagtgagagagtgggacaccccgacaatgcccggactagatcttgcccagctttcagcacccagggagaattccacgaagagactggcctgcaaaaagggatccagtgcgcagcacagacctacccggggcccttcccagaagcaataagttcctctgcggacccggggctggaagagagccccgctgccttggagccgccctcctgaagcttgaaaatggaagaatttagttttgttggttgaattgaaaatggcgacttgagaaacaactgtgccttcttttctttctttcttttttttaacctctacagacacaatcctcaaaccaacaaaactcagtatacacagccgctattcattgagggctggatacctcaacaagactgagagcctttccccgcttctctccaagaaggagacgttcagctagatttgttcccatttccgttgtgttaattcaaagctcatgcccccctacggtacaggctgaggtacacggttagcaaaaccatgggaaggggaatagcggtgcatatcattaactaacactccaaacaaaggtgagcttgcccaggacttggcatttccaaatcaaagtttttagatatgaacacctactgtgagttctgctacaaggcacaaatgaatttgtctcaactatgcaatttgattggaaaaatgtatgtgcagcatgttacatttactttcacggaataaagcagatatgtttctg

SEQ ID NO: 261 - DNA, 2117 bp, Homo sapiens
  CDS (182)..(1249)
tgtcgttgttctgagggataatgatctcaacaaacaaactggacaaataatagaggatgatcaggaaaaacatttaagtcaagaggataatgatctcaacaaacaaactggacaaataatagaggatgatttagaagaagaagacatcaagcgaggaaaaagaaaaaggctatcctctgtgatgtgtgacagtgatgagagtgatgacagcgatatcctagttagaaaagtaggtgttaaacgtccccgtagagtggttgaagatgaaggttcttcagtggaaatggagcaaaagactcctgaaaaaacattagctgcacaaaagcgagaaaaacttcagaagctcaaagaactctcaaaacaaagatctcgtcagagacgcagtagtggtagagattttgaggactctgaaaaggaatcttgcccaagcagtgatgaagttgatgaggaggaagaagaggataattatgaatctgatgaagatggagatgattatattatcgatgactttgtagtgcaagatgaggagggtgatgaagagaataaaaaccaacaaggagaaaaattgactacatcacaactgaaattagtaaaacagaattctctttattcttttagtgaccactatactcattttgaaagagttgtgaaggctcttctgatcaacgctttagatgaatcttttctgggaacattatatgatggcacaaggcaaaaatcatatgcaaaagatatgctaacatctcttcattatttggataaccgctttgttcagcctcgtctagagagcttggtatctagaagtcgttggaaagagcaatataaggagcgagtagaaaattattctaatgtaagtattcatttgaagaatcctgaaaactgttcctgccaggcttgtggactgcatcgctactgtaaatattcagtgcatttatcaggagagttgtataacaccaggaccatgcaaatagataatttcatgtcacatgataaacaggtgttcactgttggcagaatttgtgccagccgtaccagaatttatcataaactgaaacattttaaattcaaactataccaggaatgttgcaccattgcaatgacagaagaagttgaagatgaacaagttaaagaaacagtggaaagaattttcaggcggtcaaaagaaaatggctggattaaggagaaatatggtcaacttgaagaatatctcaattttgcggattactttcaagaagagaagtttgagttgtaacacatttccatcagagaagattttttaaattcctgtaaatgtgaagagcttgattcttgtttttctgtatcatgtgacatgtttgtacattttatctatatcttcatggcaaaatattttgtttaaaacatgattatcttaattcctgtgaagtggcactctacactctaattaaacttttatctgatgtacataaaagcattatcttaatttttaagtctgtaaatatattttaaagttatataataatggctttataacagatgactgtcaagtgaatgagctgttgatatcctgtcagtttagtcaacatatattgtatcttaaaaatgtatttagactaacgtctacatgtatttttacggaattcctgtccagatctgtttattcttttacagtattaaatgattttcactaatatattttttactgctatcatctaaatcagtgggccatggaagaaacctcatatatcattcagttcaatcccattgcttcagaatcagatcatagcatatctattctaagtagaggaatgcttttttccttttcttgaaagtttctctttcaaatagatttcaggcctctagagtctttcaaccctcacattcaggaataattttatgtaaattttcatgctttataatgttcttacttttttctattcaattttgtctatatattgatgattaagatgtattttatttatttttatccatagctttttccatataagtatgtatcttagggtcagaactgctgaaagagacaaactcagccaaaaacacttggaaagcatattttggtatctgcattgctttgcatatctaaattttcccataaagtaataaagtaaaatggttgc

SEQ ID NO: 262 - DNA, 4087 bp, Homo sapiens
  CDS (539)..(3130)
tttcgtggtgccagccctggtggttgtgttctatgaactggactgggatgagcctcagtggaaagaaaagcagtctgagtgcgccaccagagtggaaatagtcaggcaaagtttacaaggaagaaacacaaaagttgcagtggttctgattcagaagaaaacccctttgcccccaggagaagatgtcattgcttcagaaagggctgcagctttatgcaatgcatgtgaactctcaggaaagtctttgtttgtactgccgcacactgaccaccttgtgggttatattataagattggaaaatgccttttatgaacatgcacagacttattactacactgagatcagaagagtgaaatctcataaagaatttttgaataaaacaacacaccagcttttatttgttaggcatcagttcaaaatagctttcttcagtgagttgaaacaagatacacaaaatgcgctgaagaattataggaccgcctataatcttgtacacgaattgagagcccatgaaactaatattctggaaattaagactatggcaggatttataaactacaagatctgtaggctgtgttttcaacacaacaccccattggatgcaattgctcagttccgaaaacacatcgacttgtgtaagaaaaagattggaagtgcagagctgtcttttgagcatgatgcatggatgtctaaacaattccaggcctttggagatttatttgatgaagctattaagttagggttaacagctattcaaactcagaatcctggtttctattaccagcaggcagcatactatgcccaggagcggaaacagcttgcaaaaaccctctgtaaccacgaagcttctgtaatgtatcccaatcctgatcccttagaaacacaaacaggcgttcttgacttttatggacaaagatcatggcgacaaggaatactaagttttgatctttctgatcctgaaaaagaaaaggtgggaattcttgccattcagctgaaggagagaaatgttgttcactctgagataatcataactcttctgagcaatgctgttgcacagttcaagaagtataagtgcccgcgaatgaaaagtcacctaatggttcagatgggagaggaatattattacgcaaaggattataccaaagctttgaagttgctggattatgtgatgtgtgattatcggagtgaaggatggtggactctgctcacttctgtattaactacagctctgaagtgctcctacctcatggcccaattaaaggattacattacttactccctagaactccttggtagagcttcaactctgaaagatgaccagaagtctcggatagaaaagaacctcataaatgttttaatgaatgaaagtcctgatccagaacccgactgtgatatcttagctgtgaaaactgctcagaagctgtgggcagaccgaatttctctggctggcagcaatattttcacaataggagtacaggactttgtgccatttgtgcagtgcaaagccaagtttcatgccccaagttttcatgttgatgttcctgttcagtttgatatttatctgaaggctgattgtccacatcccattaggttttccaagctctgtgtcagctttaataatcaggaatacaaccagttctgtgtaatagaagaagcatccaaagcaaatgaagttttagaaaatctgactcaaggaaagatgtgcctagttcctggcaaaacaagaaaactgttatttaagtttgttgcaaaaactgaagatgtgggaaagaaaattgagattacttcagtggatcttgctctgggcaatgagacgggaagatgtgtggttttaaattggcagggaggaggaggagatgctgcttcctcccaagaagccttacaggcagctcggtctttcaaaaggcgacctaagctacctgacaatgaagttcactgggacagcattataattcaggcaagcacaatgatcatatccagagtcccaaacatttctgtacatctgctacatgaaccccctgcactgactaatgaaatgtattgtttggttgtgactgttcagtcccatgaaaagacccaaatcagagatgtgaagctcaccgctggcttaaaaccaggacaggatgccaatttaactcagaagactcacgtgactcttcatggaacagaactgtgtgatgaatcctacccggctttactcactgacattcctgttggagacttacatccaggggaacagctggaaaaaatgttgtatgttcgctgtggaacagtgggttccagaatgtttcttgtatatgtttcttacctgataaatacaaccgttgaagaaaaagaaattgtttgcaagtgtcacaaggatgaaactgtaacaattgaaacagtctttccatttgatgttgcggttaaatttgtttctaccaagtttgagcacctggaaagggtttatgctgacatcccctttctgttgatgacggacctcttaagtgcctcaccctgggccctcactattgtttccagtgagctccagcttgctccatccatgaccacagtggaccagctcgagtctcaagtggacaatgttatcttacagactggagagagtgctagtgaatgcttttgtcttcaatgcccatctcttggaaatattgaaggtggagtagcaaccgggcattatattatctcttggaaaaggacctcagcaatggagaatatccccatcatcacaactgtcatcactctgccgcacgtgattgtggagaatatccctctccatgtgaatgcagatctgccgtcatttgggcgtgtcagagagtcgttacctgtcaagtatcacctacagaataagaccgacttagttcaagatgtagaaatttctgtggagcccagtgatgccttcatgttctcaggtctcaaacagattcgattacgtatcctccctggcacggagcaggaaatgctatataatttctatcctctgatggctggataccagcagctgccatctctcaacatcaacttgcttagatttcctaacttcacaaatcagctgctcaggcgttttatacctaccagtatttttgtcaagccacagggtcgactcatggatgatacctctattgctgctgcatgatgttcaagaccggcccttggctgttgttacagagatgttgggcagagctatgcaggtgtttcattgtgaactctagctttgatcatggtaaaaagttaaccttttctattttttaatggatgttataccaactattcagaggaactcatacttcaaaaatattaggaaaatctgtcttatagtttctctaataaatatctgaaatctcagtacgacatgaaagaatgtcagaccattgttattgttgaaagtcatttgatgaatggtaaattctatgaaaagtaagtgatttgcatgtataatatcaggaaaattaagcatcccaagtgtgactggacaaagagagcagatgcaccagtgcctgtgccataaagttccgaatcccccatgtgtctctttcagagctggccagaccggaaataaatcattctcataaattcagtgtgtactcagaacacatacacaacaacatagggagttgtatgactgatacggaaaacttccagaaagttttaatcaaagcagtttaattaaggtatcaaaaatatctttgcttactatcaagaagtgtcaaataggttcagcttgctgccaaaatatggatcatttatgaagcaggttcatattttagaggtgttaataaaatcctcatcggaaaagatccaaagtgcaaggatttgattataaacataatttcctagactgaaagtttttggaaaagatgcagggtctgagtcaggccttctggttatattgtgcagtttcaaaagaactatttaaaactcttgaaaactcatgtaaataaaaatcatagggtgaaaattgtatttgttaaaataccttaataatttaaaatgacctgatttcctggaaaattttattattcaaaaggtggaggcattgtaaaaaggaaatagtgatgtaaataaacatgttctctttcaaaaaaaaaaa

SEQ ID NO: 263 - DNA, 970 bp, Homo sapiens
  CDS (205)..(885)
ggtccgacttcgagcagcagctgccccccaacatcatgtacccagcccgtgactacgtggagccctgggcttcgcgtagagtccctagacggggcgaaaacgggaaaaggggccttaactggggcacctggctcctttgagagctcggagtttctgactggcctgcgcaacaccccagaggcaaggtgaacgcgagggcctataatgcaagaaccaaggcgagtcacgccctgtctgggcaaaagaggagtaaagacccctcagctgcagcccggcagcgcattcctacccagggtccgccgccagagctttcccgcgcggtcggatagttacactactgtccgggacttcctagccgtgccgcggaccatctcaagtgcttccgccacactcatcatggcggtggcagtaagtcacttccgcccgggaccggaagtgtgggatactgcgagtatggcggcgtcaaaggtgaagcaggacatgcctccgccggggggctatgggcccatcgactacaaacggaacttgccgcgtcgaggactgtcgggctacagcatgctggccatagggattggaaccctgatctacgggcactggagcataatgaagtggaaccgtgagcgcaggcgcctacaaatcgaggacttcgaggctcgcatcgcgctgttgccactgttacaggcagaaaccgaccggaggaccttgcagatgcttcgggagaacctggaggaggaggccatcatcatgaaggacgtgcccgactggaaggtgggggagtctgtgttccacacaacccgctgggtgccccccttgatcggggagctgtacgggctgcgcaccacagaggaggctttccatgccagccacggcttcatgtggtacacgtaggccctgtgccctccggccacctggatccctgcccctccccactgggacggaataaatgctttgcagacctggaaaaaaaaaa

SEQ ID NO: 264 - DNA, 1980 bp, Homo sapiens
  CDS (1)..(1350)
atggcgacccaggcgaagcgtccacgggtggcggggcccgtggacggcggcgacctggatcctgtggcctgcttcctgagctggtgccggcgggtggggctggagctgagtcccaaggtggcggtcagccggcagggcacggtggccggctacggcatggtggcccgggagagcgtgcaggccggagagctgctgttcgtggtgccgctgggcctgcgctcctgtcgcagcacacctgctccatcggctggcctgctggagcgagagcgagttgcgctgcagagccagtcgggctgggtgccactgctgctggcgctgctccacgagctgcaggccccggcctcacgctggaggccctactttgcgctctggcccgagctgggccgcttggagcacccgatgttctggccagaggaggagcgccggtgcctgctccagggcacaggcgtacctgaggccgtggagaaggatttggccaacatccgcagcgagtaccagtccatcgtgctgcccttcatggaagcccaccccgatctcttcagcctcagggttcgctccctagaactctaccaccagctggtggcccttgtgatggcctatagctttcaggaaccactggaggaagcagaggatgaaaaggagcccaactcccccgtgatggtgcctgctgcagacatactaaaccacttagccaatcacaacgccaatctagaatactctgcgaattgtcttcggatggtagccactcagcccattcctaaaggccatgagattttcaacacttatgggcaaatggctaactggcaactgattcatatgtacggttttgttgaaccatatcctgacaacacagatgacacagctgacattcagatggtgacagttcgtgaggcagcattacagggaacaaaaactgaagctgaaaggcacctagtgtacgagcgctgggatttcctatgcaaactggagatggtaggggaagagggagcctttgtgatagggagggaggaggtgctgactgaagaggagctgaccaccacactaaaggtactgtgcatgcctgctgaggagttcagagagcttaaagaccaggatggagggggagatgataaaagggaagagggcagcctgacgatcacaaatattcccaagctcaaagcatcgtggagacagctgcttcaaaacagtgttctactgactttgcagacctatgccacagacttaaaaactgaccaaggtttactcagtaataaggaagtctatgcgaaactcagctggagggaacagcaagccttacaggttcgctatggtcagaagatgatcttacatcagttgttggaactgacaagttagcagtttccctgttccctgaaggaacagcaataagaactttattctaagctaatactcattgatgtttgaaaaagaggaaaatttggatctttcttttgcttactaaacaccaagaggaaaagtagcaaagttggtgtgctaggattaactcaggtaagggtgatgtgttttaggattgagaacagcagacttgggaatcactgctaattgttacttaaagcatgttacagctgttttgttctcagttttaaccaaagccagtggacatacggtagtaataagtaagtcttgttgtgtttcagcatttaataatagactttggaggtagacccctggtttaaatctaagtctagtttgaggaagtcacttaacctttattgaaaagactctggatttaataagctgtgtaactggtactcgatagttacccaaagttcagtctagatggcacaaaccacctctcagggaataaaccctaagacatcactcaaggaggacttcaattatttaattttgaactgttttgtcctctctggccataaaacttgacagtcatgaaaggtaaggcaaattttaagtgggttaagtttttaaatacgtatctactcattttctttaaaaaaaaaa

SEQ ID NO: 265 - DNA, 2052 bp, Homo sapiens
  CDS (1)..(1422)
atggcgacccaggcgaagcgtccacgggtggcggggcccgtggacggcggcgacctggatcctgtggcctgcttcctgagctggtgccggcgggtggggctggagctgagtcccaaggtgagcgagcgagccggcgggcggaggacccgcggcggggcgcgggctgccctgaccagccctcctgctcaggtggcggtcagccggcagggcacggtggccggctacggcatggtggcccgggagagcgtgcaggccggagagctgctgttcgtggtgccgctgggcctgcgctcctgtcgcagcacacctgctccatcggctggcctgctggagcgagagcgagttgcgctgcagagccagtcgggctgggtgccactgctgctggcgctgctccacgagctgcaggccccggcctcacgctggaggccctactttgcgctctggcccgagctgggccgcttggagcacccgatgttctggccagaggaggagcgccggtgcctgctccagggcacaggcgtacctgaggccgtggagaaggatttggccaacatccgcagcgagtaccagtccatcgtgctgcccttcatggaagcccaccccgatctcttcagcctcagggttcgctccctagaactctaccaccagctggtggcccttgtgatggcctatagctttcaggaaccactggaggaagcagaggatgaaaaggagcccaactcccccgtgatggtgcctgctgcagacatactaaaccacttagccaatcacaacgccaatctagaatactctgcgaattgtcttcggatggtagccactcagcccattcctaaaggccatgagattttcaacacttatgggcaaatggctaactggcaactgattcatatgtacggttttgttgaaccatatcctgacaacacagatgacacagctgacattcagatggtgacagttcgtgaggcagcattacagggaacaaaaactgaagctgaaaggcacctagtgtacgagcgctgggatttcctatgcaaactggagatggtaggggaagagggagcctttgtgatagggagggaggaggtgctgactgaagaggagctgaccaccacactaaaggtactgtgcatgcctgctgaggagttcagagagcttaaagaccaggatggagggggagatgataaaagggaagagggcagcctgacgatcacaaatattcccaagctcaaagcatcgtggagacagctgcttcaaaacagtgttctactgactttgcagacctatgccacagacttaaaaactgaccaaggtttactcagtaataaggaagtctatgcgaaactcagctggagggaacagcaagccttacaggttcgctatggtcagaagatgatcttacatcagttgttggaactgacaagttagcagtttccctgttccctgaaggaacagcaataagaactttattctaagctaatactcattgatgtttgaaaaagaggaaaatttggatctttcttttgcttactaaacaccaagaggaaaagtagcaaagttggtgtgctaggattaactcaggtaagggtgatgtgttttaggattgagaacagcagacttgggaatcactgctaattgttacttaaagcatgttacagctgttttgttctcagttttaaccaaagccagtggacatacggtagtaataagtaagtcttgttgtgtttcagcatttaataatagactttggaggtagacccctggtttaaatctaagtctagtttgaggaagtcacttaacctttattgaaaagactctggatttaataagctgtgtaactggtactcgatagttacccaaagttcagtctagatggcacaaaccacctctcagggaataaaccctaagacatcactcaaggaggacttcaattatttaattttgaactgttttgtcctctctggccataaaacttgacagtcatgaaaggtaaggcaaattttaagtgggttaagtttttaaatacgtatctactcattttctttaaaaaaaaaa

SEQ ID NO: 266 - DNA, 1342 bp, Homo sapiens
  CDS (1)..(786)
  misc_feature (1)...(1342): n = a,t,c or g
atggaagccgatgggcccgcgagcctccaggagctgcctccctcgccacggtcgccttcaccgccgccgtcgccgccaccactgccctcgccgccgtcgctgccatcgcccgcagccccggaggcccccgagctccccgagccggcgcagccgtccgaggctcacgcccggcagctgctgctggaggagtgggggccgctgagcgggggcctggagctgccccagcgcctcacctggaagctgctcctgttgcggcggccgctctaccgcaacctgctgcgctcgcccaaccccgaaggcatcaacatttatgagccagcaccccctactggtcccacccagcgacccctggaaactctgggcaatttccgtggctggtacattagaactgaaaagctccagcagaaccaaagctggacagtgaagcagcagtgtgtggaccttctggccgagggcctgtgggaggagctgctggatgacgaacaaccagccattacggtcatggactggttcgaggacagccggctggatgcgtgcgtctatgagctgcatgtctggctgctggcggccgaccgccgcacggtcattgctcagcaccacgtggccccccgaacttctgggagaggaccccctggccgctgggtccaggtgtcccacgtattccgccattatggtcccggtgtgcgctttatccacttcctgcacaaggccaagaaccgcatggagcctggtgggctgcggcggacacgggtgaccgactcctccgtgtctgtgcagctccgggagtgactggctggctcctctgtcctgaccccacagcacctccctgacctttaggagccccaactcttagtcacctcctaggcctcttatttctccctggcccttggcttctcacttgatggacagcttcacacacccttaagcggtggactccagcattttcccagcactgtctgagccccatgagggcggagccactccttgtaaattcagtgcccgacagatgctctggcacagatgctttgtagatctctgttgagagaatgcatagacacctgtgcccaaggatgctgagggctggtctctgcttctttgaacttcactgaaactgaatgctcactgctgtgttgccagcaccacccagcccagggctgtgaacggagtgggtggcagcaaatgtgtgttgaaaggggaatgaagccattcacttcactcagttcctgtcccatttaaccgccccgatccttgatcttccattaccttcacatcccggggtccttctgaactgaccttgacctctgatctcttcacacatctcnccttagcatctcctgcctcc

SEQ ID NO: 267 - DNA, 3083 bp, Homo sapiens
  CDS (179)..(1516)
gacctctgggtgcctgcaggggagctgctccagccgggccgccgggagcggtggggagagcatcgcggagccgcccctccacgcgcccgcccagccgcgctcgcccactgggctctcccggctgcagtgccagggcgcaggacgcggccgatctcccgctcccgccacctccgccaccatgctgctcccccagctctgctggctgccgctgctcgctgggctgctcccgccggtgcccgctcagaagttctcggcgctcacgtttttgagagtggatcaagataaagacaaggattgtagcttggactgtgcgggttcgccccagaaacctctctgcgcatctgacggaaggaccttcctttcccgttgtgaatttcaacgtgccaagtgcaaagatccccagctagagattgcatatcgaggaaactgcaaagacgtgtccaggtgtgtggccgaaaggaagtatacccaggagcaagcccggaaggagtttcagcaagtgttcattcctgagtgcaatgacgacggcacctacagtcaggtccagtgtcacagctacacgggatactgctggtgcgtcacgcccaacgggaggcccatcagcggcactgccgtggcccacaagacgccccggtgcccgggttccgtaaatgaaaagttaccccaacgcgaaggcacaggaaaaacagatgatgccgcagctccagcgttggagactcagcctcaaggagatgaagaagatattgcatcacgttaccctaccctttggactgaacaggttaaaagtcggcagaacaaaaccaataagaattcagtgtcatcctgtgaccaagagcaccagtctgccctggaggaagccaagcagcccaagaacgacaatgtggtgatccctgagtgtgcgcacggcggcctctacaagccagtgcagtgccacccctccacggggtactgctggtgcgtcctggtggacacggggcgccccattcccggcacatccacaaggtacgagcagccgaaatgtgacaacacggccagggcccacccagccaaagcccgggacctgtacaagggccgccagctacaaggttgtccgggtgccaaaaagcatgagtttctgaccagcgttctggacgcgctgtccacggacatggtccacgccgcctccgacccctcctcctcgtcaggcaggctctcagaacccgaccccagccataccctagaggagcgggtggtgcactggtacttcaaactactggataaaaactccagtggagacatcggcaaaaaggaaatcaaacccttcaagaggttccttcgcaaaaaatcaaagcccaaaaaatgtgtgaagaagtttgttgaatactgtgacgtgaataatgacaaatccatctccgtacaagaactgatgggctgcctgggcgtggcgaaagaggacggcaaagcggacaccaagaaacgccacacccccagaggtcatgctgaaagtacgtctaatagacagccaaggaaacaaggataaatggctcataccccgaaggcagttcctagacacatgggaaatttccctcaccaaagagcaattaagaaaacaaaaacagaaacacatagtatttgcactttgtactttaaatgtaaattcactttgtagaaatgagctatttaaacagactgttttaatctgtgaaaatggagagctggcttcagaaaattaatcacatacaatgtatgtgtcctcttttgaccttggaaatctgtatgtggtggagaagtatttgaatgcatttaggcttaatttcttcgccttccacatgttaacagtagagctctatgcactccggctgcaatcgtatggctttctctaacccctgcagtcacttccagatgcctgtgcttacagcattgtggaatcatgttggaagctccacatgtccatggaagtttgtgatgtacggccgaccctacaggcagttaacatgcatgggctggtttgtttcttgggattttctgttagtttgtcttgttttgctttccagagatcttgctcatacaatgaatcacgcaaccactaaagctatccagttaagtgcaggtagttcccctggaggaaataatattttcaaactgtcgttggtgtgatactttggctcaaaggatctttgcttttccattttaagcttctgttttgagttttgccctggggcttgaatgagtcccagagagtcgttcggatggtgggaggctgcctaggaggcagtaaatccagtcacagtgcctgggaggggcccatccttccaaaatgtaaatccagtcgcggtgtgaccgagctggctaacaggcttgtctgcctggttttcctcctacacgtggacattattctcctgatcctcctacctggtccaccccagggctaccggaaggtaaaatcttcacctgaaccaattatgagcagtctccttactgaaggtacagccggatacgtggtgcccccggggctggtgttggcagccggggggaggtgcctgagggtccccacggttcctttctgcttttctgaatgcatcaagggtacgagaacttgccaatgggaaattcatccgagtggcactggcagagaaggataggagtggaatgcccacacagtgaccaacagaactggtctgcgtgcataaccagctgccaccctcaggcctgggccccagagctcagggcacccagtgtcttaaggaaccatttggaggacagtctgagagcaggaacttcaagctgtgattctatctcggctcagacttttggttggaaaaagatcttcatggccccaaatcccctgagacatgccttgtagaatgattttgtgatgttgtgatgcttgtggagcatcgcgtaaggcttcttgcttatttaaactgtgcaaggtaaaaatcaagcctttggagccacagaaccagctcaagtacatgccaatgttgtttaagaaacagttatgatcctaaactttttggataatcttttatatttctgacctttgaatttaatcattgttcttagattaaaataaaatatgctattgaaactaaaaaaaaaaa

SEQ ID NO: 268 - DNA, 917 bp, Homo sapiens
  CDS (8)..(676)
ggccattatggccagggagtgtgaaatcttcagagaagaatttctctttagttctttgcaagaaggtagagatagagacactttttcaaaaatggcaatggtatcagaattcctcaagcaggcctggtttattgaaaatgaagagcaggaatatgttcaaactgtgaagtcatccaaaggtggtcccggatcagcggtgagcccctatcctaccttcaatccatcctcggatgtcgctgccttgcataaggccataatggttaaaggtgtggatgaagcaaccatcattgacattctaactaagcgaaacaatgcacagcgtcaacagatcaaagcagcatatctccaggaaacaggaaagcccctggatgaaacactgaagaaagcccttacaggtcaccttgaggaggttgttttggctctgctaaaaactccagcgcaatttgatgctgatgaacttcgtgctgccatgaagggccttggaactgatgaagatactctaattgagattttggcatcaagaactaacaaagaaatcagagacattaacagggtctacagagaggaactgaagagagatctggccaaagacataacctcagacacatctggagattttcggaacgctttgctttctcttgctaagggtgaccgatctgaggacttcggtgtgacatgaagactggtgatcacatgccaggctggtgagcagggaaaggaaaagggacacgttacggttcatacaaccttacacagagtttccaacttgcgagggtcagaatacagagagctatgaaaagttggcgaggaggaagaaagccattggatgcacacacttgagctcaccaaggggccacagagagaccaataaaaaatacgaagattgtgtttctcgctctctattaacatacacttgg

SEQ ID NO: 269 - DNA, 1432 bp, Homo sapiens
  CDS (93)..(1004)
ggccattatggccggggcagtgtgaaatcttcagagaagaatttctctttagttctttgcaagaaggtagagatagagacactttttcaaaaatggcaatggtatcagaattcctcaagcaggcctggtttattgaaaatgaagagcaggaatatgttcaaactgtgaagtcatccaaaggtggtcccggatcagcggtgagcccctatcctaccttcaatccatcctcggatgtcgctgccttgcataaggccataatggttaaaggtgtggatgaagcaaccatcattgacattctaactaagcgaaacaatgcacagcgtcaacagatcaaagcagcatatctccaggaaacaggaaagcccctggatgaaacactgaagaaagcccttacaggtcaccttgaggaggttgttttagctctgctaaaaactccagcgcaatttgatgctgatgaacttcgtgctgccatgaagggccttggaactgatgaagatactctaattgagattttggcatcaagaactaacaaagaaatcagagacattaacagggtctacagagaggaactgaagagagatctggccaaagacataacctcagacacatctggagattttcggaacgctttgctttctcttgctaagggtgaccgatctgaggactttggtgtgaatgaagacttggctgattcagatgccagggccttgtatgaagcaggagaaaggagaaaggggacagacgtaaacgtgttcaataccatccttaccaccagaagctatccacaacttcgcagagtgtttcagaaatacaccaagtacagtaagcatgacatgaacaaagttctggacctggagttgaaaggtgacattgagaaatgcctcacagctatcgtgaagtgcgccacaagcaaaccagctttctttgcagagaagcttcatcaagccatgaaaggtgttggaactcgccataaggcattgatcaggattatgggtttcccgttctgaaattgacatgaatgatatcaaagcattctatcagaagatgtatggtatctcccttttgccaagcccatcctgggatgaaaccaaaggagattttgaaggaaaatcctggtggctctttgtggagcgaaactaaacattcccttgatggtctcaagctatgatcagaagactttaattatatattttcatcctaattaagcttaaataggaaagtttcttcaaacaggattacagtgtagctacctacatgctgaaaaatataggctttaaatcattttttatattataaactctgtataatagagattagtcccatttttttaaaaaatgttttccccaaaccataaaaccctatacaagttgttctagtaacaatacatgagaaagatgtctatgtagctgaaaataaaatgacgtcacaagac

SEQ ID NO: 270 - DNA, 1211 bp, Homo sapiens
  CDS (184)..(768)
gagctgagccatgtacttcaaacagaaggcagccaattactaacttctggttgctaggtgtggcttcctttaaaatcctataaaatcagaagcccaagtctccactgccagtgtgaaatcttcagagaagaatttctctttagttctttgcaagaaggtagagataaagacactttttcaaaaatggcaatggtatcagaattcctcaagcaggcctggtttattgaaaatgaagagcaggaatatgttcaaactgtgaagtcatccaaaggtggtcccggatcagcggtgagcccctatcctaccttcaatccatcctcggatgtcgctgccttgcataaggccataatggttaaaggtgtggatgaagcaaccatcattgacattctaactaagcgaaacaatgcacagcgtcaacagatcaaagcagcatatctccaggaaacaggaaagcccctggatgaaacactgaagaaagcccttacaggtcaccttgaggaggttgttttagctctgctaaaaactccagcgcaatttgatgctgatgaacttcgtgctgccatgaagggccttggaactgatgaagatactctaattgagattttggcatcaagaactaacaaagaaatcagagacattaacagggtctacagagaggaactgaagagagatctggccaaagacataacctcagacacatctggagattttcggaacgctttgctttctcttgctaagggtgaccgatctgaggactttggtgtgaaatgaagaacttgggctgattcaggatgccaagggccttgttatgaaagcaaggagaaaggggaaaggggacaagacgtaaaacgtgttcaataccatctttacacagaagtatcccgaattttcgaatgtttctcaaaatccccgtacagtacctttgtagataacacttttgaccggataaaggggacttagaaagtaactgccactattgtggaggggcgccaaaaaaaaactttttttgtggagagaatataccagcaaaggtgggttcccccacagtatgggacagaggtgcagctgcgaagaagatacacaaacaagatatagactcccacgccgacagaaaaaaggcaatggagcgaagaacacgacagacacataatatcaggtgtcatcttgtgtgtactttcctcttctcatatcttacaacataagcatgaagc

SEQ ID NO: 271 - DNA, 2603 bp, Homo sapiens
  CDS (120)..(2048)
cttgagctttaaactgaagagtttcgcttacagcctcaccactggcatccatgtgatatcgtttggctttttcttgtaatacagcatcaaaagtctcctgtgtaattcgtctggctgccatgttattttgccccgccgccgccgccgcgcgaggcggggacatgcaaatgaaccaacggtctccgcagcgccgcgccgcgcaggcgcaagccgccgccgagtcctggtgcgcaggcgcgggccgccgcggcccggctctcttgcgcaagcgcgctgtccgcttcttctgggcggacgctctggaggcaaaacatttccctgctgggggcggcgaccaccgtgagcgtcccggaaggggcggcaaagacgcctccgtcgcgcacgaggtggcctcgttggctttaccttggttcgcggtcgtccttggttatcgtgagcgtccgcgagtctctgggaggccaagcctaggggcgccacagcgcctgcgcgcgtacggcggccggaaggggctagaggcggctccctgggtgacaaccgcgcgccccacctttccccacgtggccgcgaagaccggctcaggagcatctatcggctgcacgccaacatcaacacaggcgaagatggtctccaagcgcattgcccaggagacctttgatgcagctgtgcgcgagaacatcgaggagtttgcgatggggccagaggaggcagtgaaagaggccgtggagcagtttgaatcgcaaggggttgatctgagcaacattgtaaagacggcacctaaagtctctgcagacggatcccaggagcccacacatgacatcctgcagatgctcagtgacctccaggagtctgtggccagctctcgcccccaggaggtgtcagcatacctcacccgcttctgcgaccagtgcaaacaggacaaggcctgccgcttcctcgcggcccagaagggggcctaccccatcatcttcactgcctggaagctggccactgcaggtgaccagggccttctgctccagtccctcaatgccctgtcggtgctgactgatggacagccagacctcctggatgcccagggcctgcagctcctagtggccacgctgacccagaatgctgatgaggctgacctgacctgctctgggatccgctgtgtgcgtcacgcttgcctgaaacatgaacagaatcggcaagacctggtgaaagctggcgtgctgcctctgctgactggtgccatcacccatcatggccaccacactgacgtggtcagggaagcctgctgggccctgcgtgtcatgaccttcgatgacgacatccgtgtgccctttggccatgcccacaaccatgccaagatgattgtgcaggagaacaaaggcttgaaggtgctcatcgaagccaccaaagcgttcctggataaccctggcatcctgagcgagctctgtggaaccctgtcccgcctggccattcgcaacgagttctgccaggaggtcgtcgacctcgggggcctgagcattctggtgtccctgctagccgactgcaatgaccaccagatgagggaccagagcggcgttcaggagctcgtgaagcaagtgctgagcaccctgcgagccatcgcaggcaacgacgacgtgaaagatgctattgtccgtgctggtgggacggagtccatcgtggctgctatgacccagcatctgaccagcccccaggtgtgtgagcagagctgcgcggccctgtgcttcctggccctgcgtaagcccgacaacagccgcatcatcgtggagggtggcggggctgtggcagcactgcaggccatgaaggcacacccgcagaaggccggcgtgcagaaacaggcttgcatgctgatccgaaacctggtggcccacggccaggccttctcgaagcccatcctggacctgggggctgaggcactcatcatgcaggcccgatctgcccaccgtgactgtgaggacgtggccaaggccgccctgcgggacctgggttgtcatgtcgagctccgagagctgtggacaggccagaggggcaacctggcgccatgaccccaggcccagtctgggccgtgactctgggtgagtcgtgtgactcaggaatgggggtagatccatgtcctccactgtcccccattagttctgtccccttcacaatgagaagtgttttctggcaggccctaggtaaagggtcgggggaggggggagccttgtagggaggcctctacacagaagaaagcagcccccatgtcccagccacttctgggtcccagccagcagcacggatgttactgtcctgctccttcccccagccccacgccctaccagagggggcaaagggcacgtcccatcactcactgccctgtctgaaatgtggcagccactgtgggccaggctcagggcagggcaggcgattccagtggggttgggccccctggcgcctgctgcttactgcagtttcatgcaggcctctgctccttgtctttcttacctgtaaaatgggtctcagatgctccgccctgcttggccccagcttgtctgtctctgggtcctgggccagccaggatacctgataataaaagatcattgggtgaaaaaaaaaaa

SEQ ID NO: 272 - DNA, 1363 bp, Homo sapiens
  CDS (418)..(693)
acggatatactcttctaagaagagcttcttgaggtcagggatcatgtcttttgtttttgcgtgcccagacctaggtcttagaagacgcctaataaacatcagttgaaaaaaatgactggatgatctttcactttttccacgcagaaaacacgtggcgacatcactgagaaacctcccggccaacagagggcgcgacgtccatttcagcgcagtggggcccagttgcggacgcctagcttccttccgtcctttggctgaagttcagccaatccctgcactccgagagagccggcggccagggggcagggtcacagggcaaggtcccgcgggccgctgggtgcggcgacttccgtgctcccggcgagcgggcggagagcgggggccgcactggggagtgtgggctgggccgcagatgtcatgtggcctgtgttttggaccgtggttcgtacctatgctccttatgtcacattccctgttgccttcgtggtcggggctgtgggttaccacctggaatggttcatcaggggaaaggacccccagcccgtggaggaggaaaagagcatctcagagcgccgggaggatcgcaagctggatgagcttctaggcaaggaccacacgcaggtggtgagccttaaggacaagctagaatttgccccgaaagctgtgctgaacagaaaccgcccagagaagaattaatggaggacacagggccctatggtcctactgtgggtggtgacttgtcctgctaccatgttgacagagccccagaacccacatctaattggctttgttgcttattctggcccttcccacaccacacagccacacaaatactggctgctccttgatggccaggcagacccagcagcagccgaggggccagtgaagaggaaggccgcatctgttgtgtggtggccacaagcactcaggcatctgagtttactggtgcactgctgggaggagagttatgagatgaacattggctgtcaatctctgtgggcaggcggtttggcctctagtgggaatggctgggatttgggcgttgcctttaggagggatacctgcatgtctagttccagtctgcactggaaagaattcaaatatgcacctggctcccttcactattttgccctatcctttgtgctcattcttactgaaatctgtcttgtcagctcaggaatgggattcccccaggaaggaaagcacttttctgttctgggaagcccagactgttcactttggggcagggacgaacatgtgcctcgtgaatttgcttgaaaacagtcaccatcttctacccccatccctgtatagtgaaaaacctgattaaagtggtatctgagaaccataaaaaaaaaaaaaa

SEQ ID NO: 273 - DNA, 1568 bp, Homo sapiens
  CDS (108)..(1565)
ccagggtggacgcatgccctcaggtgcgggcgtcttgcgagtcggcctcgcagctctgtggaagccgcacgcggcttgtcggaaaatcaaggcgttctgagttctagatggttaatagcaggttcttcggtgtctgcagtcgacgaacgactggtgtaggcgtttgctgtgagaatggagaatgcaggggaacgcccctgactgagaagcgggccctgggaaacgattgtgaacgcgtgaatgaattgatgactaaaatccgctgcgggggtcctacagcgcagatgatcttcagtttagatcttggaggcatatcaactgtggttctaaatggctatgatgtagtaaaggaatgccttgttcatcaaagcgaaatttttgcagacagaccatgccttcctttattcatgaagatgacaaaaatgggaggcttactcaattccagatatggccgaggatgggttgatcacagacgattagctgtaaacagttttcgatattttggatatggccaaaagtcttttgaatctaaaatcttggaagaaaccaaatttttcaatgatgctattgaaacatacaaaggtagaccttttgactttaaacagttaataacgaatgctgtttcaaacataaccaatctgatcatttttggagaacgattcacttatgaagacaccgattttcagcacatgattgagttatttagtgaaaatgtggaactagctgccagtgcctcagtcttcttgtataatgcctttccatggattggcatcctgccttttggaaaacatcaacagctgtttagaaatgcagctgtagtctatgattttctctccagactcattgaaaaagcttcagtcaacagaaagcctcagctacctcagcattttgttgatgcttatttagatgagatggatcaaggtaaaaatgacccatcatctactttctccaaagaaaacctaattttctcagtgggtgaactcatcattgctggaactgaaactacaaccaatgtgctacggtgggcgattcttttcatggccctttatcctaatattcaaggacaagttcagaaagagattgatttaattatgggccctaatgggaagccttcttgggacgacaaatgcaaaatgccttatactgaggcagttttgcatgaagttttaagattctgtaatatagttccattagggattttccatgcaacctctgaagatgcagttgtacgtggttattccattcctaaaggcacaacagtaattacaaatctttattctgtacactttgatgaaaagtactggagagacccagaagtgttccatcctgagcgatttctggacagcagtggatattttgccaagaaggaagctttggttcctttttccctaggaagaagacattgtcttggagaacacttggctcggatggaaatgttcttgttttttacagcattgcttcagaggtttcatttgcattttccacatgaactagttccagatctgaagcccaggttaggcatgacattgcagccccaaccctacctcatctgtgctgaaagacgctga

SEQ ID NO: 274 - DNA, 1464 bp, Homo sapiens
  CDS (108)..(1091)
ccagggtggacgcatgccctcaggtgcgggcgtcttgcgagtcggcctcgcagctctgtggaagccgcacgcggcttgtcggaaaatcaaggcgttctgagttctagatggttaatagcaggttcttcggtgtctgcagtcgacgaacgactggtgtaggcgtttgctgtgagaatggagaatgcaggggaacgcccctgactgagaagcgggccctgggaaacgattgtgaacgcgtgaatgaattgatgactaaaatccgctgcgggggtcctacagcgcagatgatcttcagtttagatcttggaggcatatcaactgtggttctaaatggctatgatgtagtaaaggaatgccttgttcatcaaagcgaaatttttgcagacagaccatgccttcctttattcatgaagatgacaaaaatgggaggcttactcaattccagatatggccgaggatgggttgatcacagacgattagctgtaaacagttttcgatattttggatatggccaaaagtcttttgaatctaaaatcttggaagaaaccaaatttttcaatgatgctattgaaacatacaaaggtagaccttttgactttaaacagttaataacgaatgctgtttcaaacataaccaatctgatcatttttggagaacgattcacttatgaagacaccgattttcagcacatgattgagttatttagtgaaaatgtggaactagctgccagtgcctcagtcttcttgtataatgcctttccatggattggcatcctgccttttggaaaacatcaacagctgtttagaaatgcagctgtagtctatgattttctctccagactcattgaaaaagcttcagtcaacagaaagcctcagctacctcagcattttgttgatgcttatttagatgagatggatcaaggtaaaaatgacccatcatctactttctccaaagaaaacctaattttctcagtgggtgaactcatcattgctggaactgaaactacaaccaatgtgctacggtgggcgattcttttcatggccctttatcctaatattcaagtactggagagacccagaagtgttccatcctgagcgatttctggacagcagtggatattttgccaagaaggaagctttggttcctttttccctaggaagaagacattgtcttggagaacacttggctcggatggaaatgttcttgttttttacagcattgcttcagaggtttcatttgcattttccacatgaactagttccagatctgaagcccaggttaggcatgacattgcagccccaaccctacctcatctgtgctgaaagacgctgaaactgcctgggatgttttcgggaacaagaatgtatatttgccttatccctgaacttggtttaatcaaatcaatgtgtgtattagaataaaagtcacagcatcaaaaagccaaatgaaaaaaaaaaaaaaaaa

SEQ ID NO: 275 - DNA, 1765 bp, Homo sapiens
  CDS (359)..(1762)
cagtggtaacaacgcagagtacgcggggagatattaactcagccactacaagtcaaggcaaacaggccagggccagggcagacaagaggacagacaagaggacagacatctgcagcctgtggcctcctgtcaccctcccacccaccatggaaatgccctggcccctagggtggattctgcttcttttgggaagccccctcatccacgctgagcctcttctactggcaggtacatcctggtgaccccccgagttctgagggttggcagtccggagagcattcacattcaggcccactcagactccagacagcccctcacaaggaccctcaaggtgaacctcacagtgtgggacttccccatgaggaagacagtgttggcaaggagccagctcattctctcaccaggaaacaactttatggaccaggcacctgtgacggttcccgagagcctggtgtacctcccaaaaccagggcagcaatatgtcatcatccgggcaacttgggcacccacctcgggctcctcattcatggagaagatggtgctggtggctcttcatgctggctacatctttatccagacggagaagaccatctacacccctgagtacttggttcactaccgggtgttcactgtgaaccacaagatggaccctgtgaccaggacattcactctggacatcaaggtggtctttcccgatgagggtttggggacctggaccatcgaagccagctaccaaagtacacccaagcagaagttcgaggctgcctttgatgtgaaggaatatggtgagaaagtcctcccatcttttgaggtccagctggtcccaaataagactttcttttacctcaaggatgaggctctgggcgttgacatccaggctcgtggtgttgtactgcatctcatctcatctgccacttcacagtttagaccatctctgaaagtctatgaggtagtacaggttatgtttgccatcatgagattgtccagaccatctctgcagctctatgtgatgaccatctgcattgctatgaggttgtgcaggcaatgctgtccacctgagattgtatgggctatgtctgccacttctggacattatatgaatcattcctgcagctctaacatgctacacaggccacctagtttccctgaacagatctctgaaggcctgggccacgtctccctccagaaggacacgctcatggccgcattccaaggcccaggagaggacttcattggaggctcaatctttgtcaatgtcaccatgttctcctcagggggtgagatggtgcaagctgagacctcaggggtgaagatcatccagagcccatacaacatcaagttcaccaggacaccccagtatttcaagccaggaatgcccttccactttcggattccacctcaggtcttcatctcaaatcctgatgggtccccagcttccagagtccttgtccactcccaagaccaaaaagtgtacacctcagctgaggggttggccactctgaccatcaacacagatgcaaatctggacaagctccccatcgaggtgaaaactgaggaatctcttcagccagaggagcaggcttcagccaagatgacagcttggccttacttgactcaggatgggtcaggaaacttcctacacatcgaagtaaagacattgggcacagaggttggcagcagcatccagctgagcctcaacacaaggcatcaggaccctaaaaccaaggacaagattactcacttcaccatcctggtgaggagctag

SEQ ID NO: 276 - DNA, 1341 bp, Homo sapiens
  CDS (34)..(1182)
ggaatactgggtcgacccacgcgtccggacgaaatggacatgacttgggagaagcggcttgctttcggcggcggcggcggcggcggcggtggtggttgtggcgaggctgtgcggcagggcgcacgggacctgtcctgcagcggctctctcaggccgtgggtcgtcgctgcagctgccgggaaagaaggaaacgacgactccgggggcgaacttggcacacagggaggaagggaaaggatgcatggtcatggaggctatgattctgattttagtgatgatgaacactgtggagaatccagcaaaaggaaaaaaaggacagttgaagacgacttactgctccaaaaaccatttcagaaagaaaaacatggaaaggtggcccataaacaagttgcagcagaattgctggatagggaagaagcaagaaatagaaggtttcatctcatagctatggatgcttatcaaagacatagaaagttcgtaaatgactatattttatactatggtggcaaaaaagaagacttcaagcgtttgggggaaaatgacaagacagacttggatgttatacgagaaaatcatagattcctatggaatgaggaggacgaaatggacatgacttgggagaagagacttgctaagaaatactatgataaattatttaaggaatactgcatagcagatctcagtaaatataaagaaaataagtttggatttaggtggcgagtagaaaaagaagtaatttcaggaaaaggtcaatttttctgtggaaataaatattgtgataaaaaagaaggcttaaagagttgggaagttaattttggttatattgagcatggtgagaagagaaatgcacttgttaaattaaggttatgccaagaatgttccattaaattaaatttccatcacaggagaaaagaaatcaagtcaaaaaaaagaaaagataaaaccaaaaaagactgtgaagagtcatcacataaaaaatccagattatcttctgcagaagaggcctccaagaaaaaagataaaggacattcatcttcaaagaaatctgaagattctctacttagaaactctgatgaggaagaaagtgcttcagaatctgaactttggaagggtccactaccagagacagatgaaaaatcacaggaagaagaatttgatgagtattttcaggatttgtttctatgagacgagagagagaagcctccgctccttaatgtgaaacttcatgaagttttaaacttcatgcaatttgaaattccatataagtttttatctgcaagttacagcttgtgtggtttgtctttggaaataaaaatccaggttctctcagaaaaaaaaaaa

SEQ ID NO: 277 - DNA, 450 bp, Homo sapiens
  CDS (55)..(429)
cccacgcgtccgatctcgggctcggaacgagactgcacggattgttttaagaaaatggcagacaaaccagacatgggggaaatcgccagcttcgataaggccaagctgaagaaaacggagacgcaggagaagaacaccctgccgaccaaagagagtgagtgtgcctcggtctcccgcgccccagcccagcccctcaccctgctcttccttgcaaacccactcctccaccccccaccccgccgttgtccccggtgtgggcggccccggccactctttcagtttcacaaagcgccttgtttctccccagccccaagcttccttctaaatccccacacctcgtgggtgcctcgcccacaccgggaagcacctcggttgcgggtgggggttgcagctcccctccagcgcccgcttcccgctctccacagccattgagcaggagaagcggagtga

SEQ ID NO: 278 - DNA, 1144 bp, Homo sapiens
  CDS (515)..(805)
agcgacagtgtggtttcggccgcagcagaaacgtgactgagaacgcatccccgcgatgacctgacccttctgctcagggctgggactgtccctaggagttgagcaggaacaggcatctgtggtttacagcgacctggctctccgcgggccacgtgggtggtgagggcacacgagtgggaagcggcaccgacgtgtttctccccgaccgtggctttgccaaagacttttaatagcattttttaagtgcaaaacgtctaggtaaaaatctttatcatcagtgaccaaattagaatgtatttaatatagtaggtggtttaagaactgttttaacgtaagacaaactgatagcaacattctgttgttttaaaggaagtgggtccgtgacattctgcagctagtccactactccaaggtaactatcgacttggtttcagtgaatctattttgtttttaactacagtgatttattagctcagtatctagaaattacgtatattttgtgctactgtcatcgatgtgtaaactctgtttttatttgtatttatgcacttggttcccatttggagcctctggtcttttctgggataagtggtgtctgccgagacatctcccggttgtcagtggtcaggagcagctgagctctagtctgccagctgctctgctctttctgggaaggaggtggcgcccgcccctcagggtgtctccagggctcagcttccggggtggtagagctggggagccccaggggtggggggacagctgggagatggaggtggcacctgctcccctagatcagtactggctctgaggacaggtgagcagtgggaagaccaaagaatggctggcagcgctgccagggttggaaatgggggcaagatcctggggctgtgtgccctggggcctccctcacctgtcttggtggccatggcctcagggatggctcctaggtggctgaggcacagcagtggctggaaggtgccccgtggaggctgaggtggaggcgcgcccagcagctcccccctgtggccatggcgggcacggggcgtaggagctggctggcggccggctctgcatgttcttgttgcctgtcgtctgtaactctagtgttcgacattcgccgtgatacagtggtgtcacgacgaaa

SEQ ID NO: 279 - DNA, 1739 bp, Homo sapiens
  CDS (106)..(1404)
atgctgatctcaaagggaaagcattcaacgtgtcaccattagcaactggaacagatccagaaggagctaagtgttttggaagaggatattaagagagtggaagaaatgagtggcttatactctcctgtcagtgaggatagcacagtgcctcaatttgaagctccttctccatcacacagtagtattattgattccacagaatacagccaacctccaggtttcagtggcagttctcagacaaagaaacagccttggtataatagcacgttagcatcaagacgaaaacgacttactgctcattttgaagacttggagcagtgttacttttctacaaggatgtctcgtatctcagatgacagtcgaactgcaagccagttggatgaatttcaggaatgcttgtccaagtttactcgatataattcagtacgacctttagccacattgtcatatgctagtgatctctataatggttccagtatagtctctagtattgaatttgaccgggattgtgactattttgcgattgctggagttacaaagaagattaaagtctatgaatatgacactgtcatccaggatgcagtggatattcattaccctgagaatgaaatgacctgcaattcgaaaatcagctgtatcagttggagtagttaccataagaacctgttagctagcagtgattatgaaggcactgttattttatgggatggattcacaggacagaggtcaaaggtctatcaggagcatgagaagaggtgttggagtgttgactttaatttgatggatcctaaactcttggcttcaggttctgatgatgcaaaagtgaagctgtggtctaccaatctagacaactcagtggcaagcattgaggcaaaggctaatgtgtgctgtgttaaattcagcccctcttccagataccatttggctttcggctgtgcagatcactgtgtccactactatgatcttcgtaacactaaacagccaatcatggtattcaaaggacaccgtaaagcagtctcttatgcaaagtttgtgagtggtgaggaaattgtctctgcctcaacagacagtcagctaaaactgtggaatgtagggaaaccatactgcctacgttccttcaagggtcatatcaatgaaaaaaactttgtaggcctggcttccaatggagattatatagcttgtggaagtgaaaataactctctctacctgtactataaaggactttctaagactttgctaacttttaagtttgatacagtcaaaagtgttctcgacaaagaccgaaaagaagatgatacaaatgaatttgttagtgctgtgtgctggagggcactaccagatggggagtccaatgtgctgattgctgctaacagtcagggtacaattaaggtgctagaattggtatgaagggttaactcaagtcaaattgtacttgatcctgctgaaatacatctgcagctgacaatgagagaagaaacagaaaatgtcatgtgatgtctctccccaaagtcatcatgggttttggatttgttttgaatatttttttctttttttcttttccctcctttatgacctttgggacattgggaatacccagccaactctccaccatcaatgtaactccatggacattgctgctcttggtggtgttatctaatttttgtgatagggaaacaaattcttttgaataaaaataaataacaaaacaataaaagtttattgagccacaaaaaaaaaaa

SEQ ID NO: 280 - DNA, 363 bp, Homo sapiens
  CDS (115)..(240)
cgcgacccaggcgcgggtttccggaggacagccaacaagcgatgctgccgccgccgtttcctgattggttgtgggtggctacctcttcgttctgattggccgctagtgagcaagatgctgagcaagggtctgaagcggaaacgggaggaggaggaggagaaggaacttcttggagatgactactgggggctagatactggccaaacaccgatggttcaggaacatggtggtctggccttgtaggtacatatttgacctgtcaatgtttaagctctaggaaagcatgagcttaaaagagccggaccttgggtacttgatgatgtccttaacgcttttgcggattttcagatttaaatttgaccg

SEQ ID NO: 281 - DNA, 774 bp, Homo sapiens
  CDS (399)..(566)
gatattaatcgatttccctcaagcctgcccttgctgtgaactagtgctacaagcacgggaaatccatctgctctctggcttaaaatatgtatctcatctaaaattgttcgttaaagtgtgaataaattgctaagtggttgttgcttagcaataatttttgcctgaccatcagcagagcttttatttacctttgtaattaaaatccaacatagcatgggctcttgggcaaaatatttcactgactattaagcatgtagaacaggaaaatgaaatacactatttgtgcccttgacctagaaccagaaccactaattatgagaactttgttttatgtaccaaattcacattgaccattttctgagctctagactgatcgtagtaagttttgtgacttaacaatgaaagaaagtagaaagatgctttgggttttcaaaatgttgttttttaaaattgttctttgggtgaatttactcagtgctgctttgagttgtatacagaaacaaatgttgggaattgctcctcagaaatgtgttcctaagttgtgttttcaactttacatcatgaggtgaagcattagggaaagagattctttcgatttgtttaataatctaattatacagaccaaagtgctttacgtttctgctctatgttaatgttttagaatggtgattttgctgattaatttagacctggaattgaaataatgtgctcagaataataacatggttatagttcttgtatgataaagtattcaatttcagaataaaaaaaaaa

SEQ ID NO: 282 - DNA, 2568 bp, Homo sapiens
  CDS (16)..(1782)
cagcattgtgcggtcatggtgggccagatgtactgctaccccggcagccacctggcccgggcgctgacgcgggcgctggcgctggccctggtgctggccctgctggtcgggccgttcctgagcggcctggcgggggcgatcccagcgccggggggccgctgggcgcgcgatgggcaggtccctccagcctcccgcagccgctcggtgctcctggacgtctcggcgggccagctgcttatggtggacggacgccaccctgacgccgtggcctgggccaacctcaccaacgccatccgcgagactgggtgggccttcctggagctgggcacaagtggccaatacaatgacagcttgcaggcctatgcagccggtgtggtggaggctgctgtgtcggaggagctcatctacatgcactggatgaacacggtggtgaattactgcggccccttcgagtatgaagtcggctactgcgagaggctgaagagcttcctggaggccaacctagagtggatgcaggaagagatggagtcaaacccagactcaccttactggcaccaggtgcggctgaccctcctgcagctgaaaggcctggaggacagctacgaaggccgtgtgagcttcccagctgggaagttcaccatcaaacccttggggttcctcctgctgcagctctctggggacctggaagacctggagctggccctgaacaagaccaagatcaaaccttctctgggctctggctcctgttctgccctcatcaagctgctccctggccagagtgacctcctggttgcccacaacacctggaacaactaccagcacatgctgcgtgtcatcaagaagtactggctccagttccgggaaggcccctggggggactacccgctggttcccggcaacaagctggtcttctcctcctaccccggcaccatcttctcctgcgacgacttctacatcctgggcagtgggctggtgacactggagaccaccattggcaacaagaacccagccctgtggaagtatgtgcggcccaggggctgtgtgctggagtgggtacgcaacatcgtggccaaccgcctggcctcggatggggccacctgggcagacatcttcaagaggttcaacagcggcacgtataacaaccagtggatgatcgtggactacaaggcgttcatcccgggtgggcccagccccgggagccgggtgcttaccatcctggagcagatccccggcatggtggtggtggctgacaagacctcggagctctaccagaagacctactgggccagctacaacataccgtccttcgagactgtgttcaatgccagtgggctgcaggccctagtggcccagtatggggactggttttcttatgacgggagcccccgggcccagatcttccggcggaaccagtcactggtacaagacatggactccatggtcaggctgatgaggtacaatgacttcctccatgaccctctgtcactgtgcaaagcctgcaacccccagcccaatggggagaatgctatctccgcccgctccgacctcaacccggccaatggctcctaccccttccaggccctgcgtcagcgctcccatgggggtatcgatgtgaaggtgaccagcatgtcactggccaggatcctgagcctgctggcggccagcggtcccacgtgggaccaggtgcccccgttccagtggagcacctcgcccttcagcggcctgctgcacatgggccagccagacctctggaagttcgcgcctgtcaaggtttcatgggactgaagttctgtccctgctctgctgctttcgcccctgctgaccctcgtcagggtcacccccgtcccaaggccaccggacttctaactccagcccctcctgggggcttcgttctctgatctggggtctgagtcatctcctcctagagtgggtcacgaacctgatggggctcagaactgaccccctctctcccccgaggtgggtgggcaccgtggcgtctcttctgccctgccctaaatctcccactctctgtttctgtctgtttcctactgctgctctctcaacctcattcccacctctggggccccttcctcgtgcttctccttcctgagggtttgggaaggtcctggggcagactctggggctcccatggggtggaaggagcctgttccagcacccttctcccagctgcattcccacgggtggccctggagctggtgagctttgtctgggcgttgtcttcggctggcattgctcctcccagctctggcccctctgctccctcaggaagcagtcccctcgtctccctttctgggcagcttccttgaggacagaaacttgaaaacaaacacaaaccaaagtttctggccatctgtggctggagggttctgaatgtcctctctccatgtcaggcagagggtcagcccccatgcttctgcctcaggccccaccccaccccaccccaggcctgcccctcacctcagggccatacccacagcgccctgatggaggaaccagaccgcaggctgtgccaccattaaacaagagcggctgtggcaaaaaaaaaaa

SEQ ID NO: 283 - DNA, 677 bp, Homo sapiens
  CDS (161)..(379)
cccacgcgtacgggtctcatcacatataaaatgtttgtagattctcaggattcttgtacacacctgggggggggtcttgatagtggagggggatgctcttaaagaactggacaagacatttaacctgccagttctggaagcactgctcagggatgtcaacatgcaggaataccccgatttatttcacatttataaaggctttgaacatgtaatccatgacgaattgcctctcccagaaagcgacgacgaagagagggtggagaggtctggcctcctactacgtcttgagctgggaactggtgaaaactcttttcgaagcctgacttggccaccttcgggttccccatctcatgctggtttgttcctgtttactactctttgagcctctgctattcttgcccctttctggaatgtgctgtggggttgcctctttgtgttaatgattgtccagaattttcaggttttacatctacagtttttccatttctgggatttaaataacaagtccttatcctctaggttgcctaggaggggttcttcctcccacaccccttaatcacacttggctgctgggttcctgctgccgctgagcctggtcgtttttcccaagtggcggcttcaccaatttctgtccgcatctgctttaaaaccgggggctgcccctggggcccctaact

SEQ ID NO: 284 - DNA, 1826 bp, Homo sapiens
  CDS (76)..(1347)
aactgatgcctccactggccactcctccctccgtccacctgtcacttcgggtagctgggaggccagttaaaaaaaatggaacctttttcctgtgacactttcgtggcattacctccagcaacagtcgataacaggattatttttggaaaaaattcagatagactctatgatgaagtacaagaggtggtttattttcctgctgtagttcatgataacctgggagaacgtcttaagtgtacatatatagaaattgatcaagttcctgaaacatatgctgttgtcctgagtcgcccagcgtggttgtggggggcagaaatgggagccaatgagcatggagtttgcattgggaatgaagctgtatggggaagagaagaagtttgtgatgaagaagcactattaggaatggaccttgtcagacttggccttgaaagagctgatacagctgaaaaagccctcaatgtcattgttgacttactagaaaaatatggccagggtggaaattgcacagagggtagaatggtatttagctatcacaacagtttcctgatagctgataggaatgaagcctggattctggagactgcagggaagtactgggcagcagaaaaagtacaagagggagttcgtaatatttctaatcaactttccataacaaccaagattgcccgggaacacccagacatgagaaactatgctaagcggaaaggttggtgggatggtaaaaaggagtttgattttgctgcagcatattcctatcttgacacagccaagatgatgacttcatcaggcagatactgtgagggctacaagcttctaaataagcacaaaggaaatataacttttgaaacaatgatggaaattcttcgagataaaccaagtggcattaatatggagggagaattcctgaccactgcaagcatggtttctattttacctcaagactccagccttccttgcattcacttctttacagggactcctgatcctgagagatctgtttttaagcctttcatatttgtgccacatatttcacaactattggataccagttcaccaacatttgaacttgaagatctagttaaaaagaaatcacattttaagcctgacagaagacacccactctaccaaaaacatcaacaggcattggaagtagtaaataataatgaggaaaaagccaaaataatgttggacaacatgaggaaactggagaaagaactattcagagagatggaatcaatccttcaaaacaagcatcttgatgtggagaaaattgttaatctctttcctcagtgtacaaaagatgaaattcaaatttatcagtcaaatttatcagtcaaagttagttcttagtgatcatatggtcagctaatattagttcttagtgatcagtggtcagtaatcttcaaagtcagaatctatcaccttggtaaattatataaacctaacttgagcagatctgattattcttggatagtattcaagtggtatcttgactattaaactacgtatagtgttgctgaaatagaaagaaaacagcattggaattggattcatgtatcgtgggatacaggtgttatttcaggtgatgtacttgcattattttctttagccatagtaactttttgtcacaataactaagtattcaattatatataaagagtgaaacattaaaatgacgcatggatttatatttattataattatgtagtaccctcaaatcattttgtcagttacatcaagaaagcagatttttctttagtcatgaaaaatatctcaagtggtaagttgtttgtgctttaggcaaacattaaccagctctaacaaga

SEQ ID NO: 285 - DNA, 408 bp, Homo sapiens
  CDS (117)..(284)
caaaaacaacctgcatgaccccatgtctgggggctggggggaaggaaaggatctgccacatgttctggtgcgagcccaatgctgccagcctctcataggctgtgcaggctgcgtgcatgcttcgctaccagaagtgtctggatgcccgttcccaggcctccacctcctgcctcccagaaccccctgctgagtctgtggcacggcgtgtagggtggactgtccgcaggggtgttcagtcgctgtggggctccctgaaacccaaacgggtgggggcccataccccatgaagaagcccccaccttccctccacctgcttgtgttgggccccagggaactaaagggtgtgggtcagggaggggtctagaggctattcctacgcctcaggcctcccaaatatgcccctcccca

SEQ ID NO: 286 - DNA, 566 bp, Homo sapiens
  CDS (257)..(424)
gcctccgggcgtgcgcctgtcccgggcgcccgccgctgcctccctctcttgcctctggggagtcccggcgggccgcgaccccagctccagctgccgctgagccgccgccgccgctacagcgaccctgaccgccgtccgagccgccagacacccagagagacgccagaggccgcggaggggcgaagacccgggtaactctcccttccaccccaacccggatcgccagccctcgagagctctgtgctccacgccgaggatgcaccgtctctggattggtccggccttcttcctaatgacatcgctcagcgtctctggagccgtcatcccgcggaatgggggcccagggggtgtcagctcggggccttgcctcttgcagctactctgtggtcaggccgggtcctccaccatcaggaagatcccatcctgagctctgtctcctgcccctcgtgctgtgggatgctgagcacagagcccacagcccatctgcctcttcacctccctgaatccgtgtccatctgcaataaacgacagcctcggctgcctcgtgctgtgtcaaaaaaaaaaaa

SEQ ID NO: 287 - DNA, 3604 bp, Homo sapiens
  CDS (544)..(3375)
cgccgcggaatttccgggtcgacgatttcgtgcggtgagggtcgcggccggcggccgaggcgcaggtgcgggtcgagagaccggcgcctccctccccgccgcccgtggactctgagcgcaggtgtttctactctgccggccgctccacctgggaaagcgccttcaagagctacctctggcggcacctggccctcagctgcagggaaaccgcactcaaacctgccgccgagcccgggtttttctgcaaaactcagaggacctggctcttgcccgaggtgccctgaaccattgtgtgaataagctggggaagcctgactggagtgttttttctttttaataaaaagagtttttctgaatctcaatttttagaaattttttttgcgaagtttgcaatactctctacctcttcgcatcctctcttgctcgtggagtctttttcctcctcagctataaatattttttactatcggcggagcagaccagggatgaacgtcttttaattgcaagtataactgttaaaaccacgtcgggatagtagtcaagatggataaaaagtcctttgaaatggtgctggatgaaattagaaaggctgttttgacagaatacaaattaaaagcaattgaatatgtgcatggatacttttctagtgaacaggtggttgatttgctgagatatttttcctgggccgagccccagttgaaggcaatgaaagcattacagcataaaatggtggctgtccagccaacagaagtggtcaatatactcaactgtttcactttcagtaaagacaaactagttgctcttgaactgttagcctcgaacattattgatgcacagaattctcgtcctattgaagatttattcagggtaaatatgtctgagaagaaacggtgcaagagaatacttgaacaggctttcaaggggggctgcaaagctcctcatgctatgatatcttcttgtggaacaatcccaggaaatccatatcccaaaggaagacctagccgcataaatggaattttcccaggaactcctttgaaaaaagatggtgaagaatgtactaacgaaggcaaaggaatagctgcacgaattcttgggccatccaaaccacctccttcaacatataatccacataaacctgttccttatccgatacctccatgccgaccacatgcaactattgcaccaagtgcttataacaatgcaggtctggtaccattagcgaatgtcatagctccacctccacctccatatactcctaatcctgtaggaacagagaatgaagacctttcgaatccgtcaaaacctatacagaatcaaacattttccaccccagcaagtcaactcttttctcctcatggttctaatccttcaacacctgctgcaactcctgttcctactgcatccccagtcaaggcaattaatcatccatcagcatcagcagctgccaccgtttctggaatgaacctgctgaatactgtccttcctgtgttcccagggcaggtctcctcagccgttcacacacctcagccatcaataccaaacccaacagttatcagaaccccttcattgcccactgcacctgttacatccatccacagtacaaccaccactcctgttccttccattttttctggcctagtgtcactgccaggtccttctgccactcctaccgcagccactcctaccccaggacctacaccacggtccactcttggttccagtgaagcatttgcttctacttctgcacctttcactagcctccccttttccaccagctcttctgctgcttctaccagcaacccaaattctgcttcattgtcatcagtttttgcagggctccctttgcccttaccaccaacatcccaaggcctatccaacccgactcctgtaattgctggtggctctactcccagcgttgccggtccacttggtgtgaacagtcctcttttgtctgcgttaaaaggttttctgacatccaatgacaccaatttaatcaactcctctgctttatcctctgctgtcacaagtgggctggcttcactatcttctcttactcttcagaactctgactcttctgcttcagcccctaacaagtgctatgccccatcagccatccctaccccacagaggacttccactccagggttggccctgttcccaggcctgccgtctcccgtggctaactcaacttccactcccctgacattgcctgtacagtctcctttagccactgctgcatcagcttccacgtcagtgccagttagctgtggctcctcagcctcccttttgcgtggcccccacccaggtacctcagatctgcatatttcatctacccctgctgcaacaactcttcctgttatgatcaaaactgagcccacaagtcctactccctcggccttcaaaggtccatctcattctgggaatccctctcatggcactttaggtttgtcagggacattgggccgtgcatatacttcaacatccgtgcccatcagtttatctgcttgccttaatcctgcattgtcaggtctctccagcttgagtactcctttaaatggttcaaatcctctttcctctatttcccttccaccacatggttcctccactcccattgcaccagtattcactgctcttccttcttttacttctttgaccaacaattttcctttaactggcaacccatctcttaatccgtcagtatctctcccagggtcattaatagccacctcatctaccgctgccacctccacatctctccctcatcctagctcaacggcagctgttctctcagggctttctgcttcagcaccagtctcagcagcacctttccccctcaacctgtccactgctgttccctcacttttctctgttactcaaggacctctgtcatcttcaaatccctcctatccaggcttttctgtctctaataccccaagcgttacccctgctcttccctcattcccggggctgcaggcgccctctacagtcgcagctgtcacaccactacctgtggctgccacagccccatccccagctccagtcctcccaggattcgcctcagcattcagttccaatttcaactccgctcttgttgcacaagccggtttatcatctggacttcaagctgcaggcagttctgtttttccaggccttttgtccctcccgggtatccctgggtttcctcagaatccttcacaatcatccttgcaagaattacagcataatgcggctgcgcagtcagcattgttacagcaggtccattcagcttcggctctggaaagctatccagctcagcctgatgggtttcctagttatccttcagcgccaggaacaccattttctttgcaaccaagcctgtcccagagtgggtggcagtgaatacttttaacttttattctccttcagagcaacatcagaattgcctgagaactgcaatgaacaatctgacaaatgtgaagctggccaaaagtcggaaaatgagaatgagggtaatcctggagaaattgtgacaacaatttgaaaattgtggttgcattttaaagtgtgaacactcccctatgtaaatatgctgacaataaattgtatggagaatggtaaaaaaaaa

SEQ ID NO: 288 - DNA, 3469 bp, Homo sapiens
  CDS (91)..(3219)
gggagctcgctgccgaggggacgctgggctgagcggccggcggcgcgggcccggcggcggcggcagcggggtccgggtccggagcgccacatgagacggtttaagcggaagcatcttactgccattgactgccagcatttggctcggagtcacttggctgtgacccagcccttcggtcaaagatggacaaacagagatccgaaccatggtctctatcctaaaccgagaacaaaaagagggagtaggggtcagggaagtcaaagatgcatccctgagttcttcctagcaggcaagcagccgtgcaccaatgacatggccaaaagcaattctgttggccaggacagctgtcaggactctgagggtgacatgatctttcctgcagagagcagctgtgcactgcctcaggaaggcagtgcagggccgggctcaccagggtctgccccgccctccaggaagcggtcttggtcctctgaggaagagagtaaccaggctaccgggaccagccggtgggatggagtttctaagaaagctccacggcaccatttgtctgtgccatgcacaaggcctagggaggccaggcaagaagcagaggacagtacgtctcggctctctgcggagtctggtgaaaccgaccaagatgctggggacgtgggtcctgatcccattcctgactcatactatgggcttcttgggaccttgccctgccaggaagcactgagccacatttgcagcctgcctagtgaggtcctgaggcacgtgtttgccttcctcccggtggaagacctctattggaacctgagcttggtgtgccacttgtggagggagatcatcagtgacccgctgttcattccttggaagaagctgtaccatcgatacctgatgaatgaagagcaagctgtcagcaaagtggacggcatcctgtctaactgtggcatagaaaaggagtcagacctgtgtgtgctgaacctcatacgatacacagccaccactaagtgctctccgagtgtggatcccgagagggtgctgtggagtctgagggaccaccccctcctccccgaggctgaggcgtgtgtgcggcaacacctccccgacctctacgctgctgccgggggtgtcaacatctgggccctggtggcggctgtggtgctcctctccagcagtgtgaatgacatccagcgactgctcttctgcctccggagacccagctccacggtgaccatgccagatgtcaccgagaccctgtactgcatagccgtgcttctctacgccatgagggagaaggggattaacatcagcaataggattcactacaacattttctattgcctatatcttcaggagaattcctgcactcaggccacaaaagttaaagaggagccatctgtctggccaggcaagaaaaccatccaacttacacatgaacaacagctgattctgaatcacaagatggaacctctccaggtggtgaaaattatggcctttgccggcactgggaagacctcaacgctggtcaagtatgcagagaagtggtctcagagcaggtttctgtatgtgacattcaacaagagcatcgcaaagcaggccgaacgcgtcttccccagcaacgtcatctgcaaaaccttccactccatggcctacgggcacatagggcggaagtaccagtcaaagaagaagttgaatctcttcaagttaacacccttcatggtcaactccgtccttgctgaagggaagggtggattcataagagccaagcttgtgtgtaagactctagaaaacttctttgcctcggctgacgaagagctgaccattgatcacgtgcctatttggtgtaagaacagccaaggacagagagtcatggttgagcagagtgaaaaactgaatggtgtccttgaagcgagccgcctctgggataacatgcggaagctgggggagtgcacagaagaggcgcaccagatgactcatgacggctacttgaaactctggcagctgagcaagccttcgctggcctcttttgacgccatctttgtggatgaggcccaggactgcacaccagctatcatgaacatagttctgtctcagccatgtgggaaaatctttgtaggggacccgcaccagcagatctataccttccggggtgcggtcaacgccctgttcacagtgccccacacccacgtcttctatctcacgcagagttttcggtttggtgtggaaatagcttatgtgggagctactatcttggatgtttgcaagagagtcaggaaaaagactttggttggaggaaaccatcagagtggcattagaggtgacgcaaaggggcaagtggccttgttgtcccggaccaacgccaacgtgtttgatgaggccgtacgggtgacggaaggggaattcccttcaaggatacatttgattggggggattaaatcatttggattggacagaatcattgatatttggatccttcttcagccagaggaagaacggaggaaacaaaacctcgtcattaaagacaaatttatcagaagatgggtgcacaaagaaggctttagtggcttcaagaggtatgtgaccgctgccgaggacaaggagcttgaagccaagatcgcagttgttgaaaagtataacatcaggattccagagctggtgcaaaggatagaaaaatgccatatagaagatttggactttgcagagtacattctgggcactgtgcacaaagccaaaggcctggagtttgacactgtgcatgttttggatgattttgtgaaagtgccttgtgcccggcataacctgccccagcttccgcacttcagagttgagtcattttctgaggatgaatggaatttactgtatgttgcagtaactcgagccaagaagcgtctcatcatgaccaaatcattggaaaacattttgactttggctggggagtacttcttgcaagcagagctgacaagcaacgtcttaaaaacaggcgtggtgcgctgctgcgtgggacagtgcaacaatgccatccctgttgacaccgtccttaccatgaagaagctgcccatcacctatagcaacaggaaggaaaacaaggggggctacctctgccactcctgtgcggagcagcgcatcgggcccctggcgttcctgacagcctccccggagcaggtgcgcgccatggagcgcactgtggagaacatcgtactgccccggcatgaggccctgctcttcctcgtcttctgaggacaaggcgcacgttctccgcagtgcagagcagcttgccgaggaccccgcgtgaagaaagccagcgaggggggcttctgctccctgagactctgggttcacccacagcactttctgaggaagaggacaccagcccaagctggacctgccatttctccactccctacagacagccagtctccacttgcctcccctctggatgtatctggtcagggaagtgggggatgttcttttgataaaaaaaaaa

SEQ ID NO: 289 - DNA, 1231 bp, Homo sapiens
  CDS (87)..(1022)
gagcgctggctctgctggcggctgagaaatggaccaattttgacaagatatagtgctgcagcgtgcctgatgggatatattcagtcatggcgtccgaactttgtaagacgatctctgtggcaaggctagaaaagcacaagaatttgttcttaaattataggaatctgcaccattttccattggagttactgaaagatgagggactgcagtacttggagagactctatatgaaaaggaactccctgacatccttgccagaaaaccttgctcagaagcttccaaaccttgtggaactatacctgcactcaaataacatagttgtggttccggaagccattgggtctcttgtaaaactccaatgtctggatcttagtgacaatgccttagaaattgtttgcccagaaattggtcgtctgagagctttacgtcatcttcgattagctaataaccaactgcaattcctacctccagaggttggcgatttgaaggagctgcagacactagacatttctaccaatcgtttgctaactttacccgagaggcttcacatgtgcctttctctgcagtacctcactgtggaccgaaatcgtctatggtatgtgccgcgccatctctgccagctgcccagcctcaatgagctctccatggctggaaaccgtcttgcatttttgccacttgatttaggtcgatctcgagaactacagtatgtatacgtggataacaacattcacctgaaaggcttgccatcttatctgtacaataaagtcatcgggtgcagtggctgtggtgctcccattcaagtttccgaggtgaagctgctttccttttcatcagggcagcgaaccgttttcctcccagctgaggtgaaggccatagggacggagcatgatcacgtcctccctctgcaggaattggctatgagagggctgtatcatacctaccacagcttgctgaaaggaagacaactgttagttttgtggcttactgctgctccacccagtgtctgcagacttttgacctgctgagttgataaacactcaagaacctcaggagcgctgccagcttgacactggggaatccagccagtccagcacactcttccatcctgtcctgtccaatgcgggggcactgcagaactctctagaaatgtcatgattgagcttcagagctaaaatgccttcacccttcccccaagttggaatatatcctcccccaaattaaaaaaaaaaaa

SEQ ID NO: 290 - DNA, 2126 bp, Homo sapiens
  CDS (15)..(1277)
gactgtgagacagaatgaagttgggctgtcaagagaagccgctatccaggtatggagtccaactttgccccccaatgccaagggttcgctccacttatgccagtgtcctaaaggcccaaggtcggaacaaggaagcgatctgcccttacagaacagctctcaagttgtatccacgccatgcaagtgcgctcaacaaccttggaacactgacgagagacacagcagaggcaaagatgtactatcagagggctctccagctccatccacagcataaccgggctcttttcaatctggggaatctcctcaagtcccaggagaaaaaggaagaagctatcaccttactgaaggattccatcaaatatggtccagagtttgcagatgcatattcaagcttagcttcgttattggctgagcaggagcggtttaaagaagctgaagaaatataccaaactggaataaagaactgtccagacagctcagatttacacaacaactatggggttttcttagttgatactggcttaccagaaaaggcagtggcccattaccagcaggccatcaaacttagccccagtcatcacgtggccatggtgaacttgggaagactctacaggtcactgggagagaacagcatggctgaagaatggtacaagcgcgccctgcaggtggcacacaaagctgagatattgtcacctttgggagcactgtattacaacactggccgatacgaagaggctttgcagatttaccaggaagctgcagcacttcagccttctcagagggagctccgcttggcactggctcaggttttggccgtgatgggtcagacaaaagaagctgaaaagatgaccaatcacattgtgtcagaggagaccggatgccttgaatgctatcgcctcttgtcagccatctatagcaagcaggagaaccacgacaaggcacttgatgctatagacaaggctctccagctgaaaccaaaggacccaaaagtcatttctgaactttttttcacaaaaggaaaccaattaagagagcagaaccttctcgacaaagcttttgagagctatagagtggctgtgcaactaaacccagaccaagcacaggcctggatgaacatgggtggcatccaacacatcaagggaaaatatgtgtctgcaagagcttattatgagagagccttacagctggttccagacagcaaactgctgaaggaaaatcttgccaaattggatcgcctagaaaaacgattacaagaagttcgagaaaaggatcaaacatagcaccaccgtctgacccaacctcataggataatgtggtgcctctgaaaggggagtgatggaagccttgctttcacatcagcaggggcacaactaatgagattttctctcattccgagttcagggtgacacattttgggacatctgctggtagcccagtgctgaaggacttgcttttccatgaagaagacgaaaacagcaaacaagggcaagaaggtctgagagggaaggagaatgatatttacacattttacagatttttgtttggtttaactccagatttctcttgatatatctctgtgcttttgagacctggagatctaattctgtttagacattttttgtcccagaaatacagaagcttgaaatgctatgaaggcagagcttctattctttatgggatgaaatatttcaaaagaggataaatcctctgtggtaagccatttggaaaatcctaccaagaattggcttatttaattttccagaaccaggaatgagtatctaatagcttttgtagaaccttccagaatatgtggggaaaaagggctattgctaagtgagctttatctaatatcctcctaagagttttactagtgcttttttgaggaattacagggaagctcctggaattgtacatggatatctttatccctagggggaaatcaaggagctgggcacccctaattctttatggaagtgtttaaaactattttaattttattacaagtattactagagtagtggttctactctaagatttcaaaagtgcatttaaaatcatacatgttcccgcctgcaaatatattgttattttggtggagaaaaaaatagtatattctacataaaaaa

SEQ ID NO: 291 - DNA, 458 bp, Homo sapiens
  CDS (39)..(329)
gcacgagcctttccggtgagaccagattaactatctccatgtttgtccttttctacctcgttttttcaccactcccaaacataacctcccaatcttttttgttagtccggccgtcaatttgtatagtaccaatttctgtaaattctctcaattcattgaagatcgtagggttaaacttttttgtgtgtgatttaaacttacaaacaagtgaagaagctatcgtttatttcagacgaggctgtagtttaaataccaaaagagggaaaataaaaaagaacctttgtaaaatatatctgaacctaatggtttgtacaactggagaatcgttctagattagttaccaattaaatataactccgccagtgtaagggtgtgaggtgcagttgtccaggagacgattttgtatagtatttttcttgtacattacttccagtaaatatttgaaaatatattgaagt

SEQ ID NO: 292 - DNA, 714 bp, Homo sapiens
  CDS (297)..(605)
ggtgtcttaccaggtgctaatgtggctcttactacacacaaaacattgttctgagcgcctttcaaatacaaactcctttcatcttaagcaccacccgacagggcaggtactattaccatctccgtttgacagatgaggaacctggcacaggaagcatttaagtggattccccaggatcgccccactgtcaggagcagagtcagaatgggcctcagcatcaggctcccaatcctggcttctaactgctgcgctctgcccttctctctccccacctccccactccagtgcctttggtcatgccactgcagctttcaggccaatactggattagcctcttagtgttcttgtccctgcagccatttccccaggcagcaattccatgtgccctcactgatgtaggtggctcttgtgtcatttgtcacatcctattgaattgtttatgcatcttgttcacactcacagcaccctccctctcacacgtcctccttataaaaatgtccctcagtgtctgctatgagccaggtgcagacttaagtgacagggctgctacgggaaataaaaaattatcaaggagcacctgcctcttaatgcacagtagcgaactatgataagtgtcaggaaggaaaggttaaggatgccaggaaggctcgtaatagtaggaagacgctagatggtcaggtggtctcgtacgtgtaaccgggtgcttgtgtcgac

SEQ ID NO: 293 - DNA, 3749 bp, Homo sapiens
  CDS (1)..(2865)
atgctgcctgggcggctgtgctgggtgccgctcctgctggcgctgggcgtggggagcggcagcggcggtggcggggacagccggcagcgccgcctcctcgcggctaaagtcaataagcacaagccatggatcgagacttcatatcatggagtcataactgagaacaatgacacagtcattttggacccaccactggtagccctggataaagatgcaccggttccttttgcaggggaaatctgtgcgttcaagatccatggccaggagctgccctttgaggctgtggtgctcaacaagacatcaggagagggccggctccgtgccaagagccccattgactgtgagttgcagaaggagtacacattcatcatccaggcctatgactgtggtgctgggccccacgagacagcctggaaaaagtcacacaaggccgtggtccatatacaggtgaaggatgtcaacgagtttgctcccaccttcaaagagccagcctacaaggctgttgtgacggagggcaagatctatgacagcattctgcaggtggaggccattgacgaggactgctccccacagtacagccagatctgcaactatgaaatcgtcaccacagatgtgccttttgccatcgacagaaatggcaacatcaggaacactgagaagctgagctatgacaaacaacaccagtatgagatcctggtgaccgcctacgactgtggacagaagcccgctgctcaggacaccctggtgcaggtggatgtgaagccagtttgcaagcctggctggcaagactggaccaagaggattgagtaccagcctggctccgggagcatgcccctgttccccagcatccacctggagacgtgcgatggagccgtgtcttccctccagatcgtcacagagctgcagactaattacattgggaagggttgtgaccgggagacctactctgagaaatcccttcagaagttatgtggagcctcctctggcatcattgacctcttgccatcccctagcgctgccaccaactggactgcaggactgctggtggacagcagtgagatgatcttcaagtttgacggcaggcagggtgccaaaatccccgatgggattgtgcccaagaacctgaccgatcagttcaccatcaccatgtggatgaaacacggccccagccctggtgtgagagccgagaaggaaaccatcctctgcaactcagacaaaaccgaaatgaaccggcatcactatgccctgtatgtgcacaactgccgcctcgtctttctcttgcggaaggacttcgaccaggctgacacctttcgccccgcggagttccactggaagctggatcagatttgtgacaaagagtggcactactatgtcatcaatgtggagtttcctgtggtaaccttatacatggatggagcaacatatgaaccatacctggtgaccaacgactggcccattcatccatctcacatagccatgcaactcacagtcggcgcttgttggcaaggaggagaagtcaccaaaccacagtttgctcagttctttcatggaagcctggccagtctcaccatccgccctggcaaaatggaaagccagaaggtgatctcctgcctgcaggcctgcaaggaagggctggacattaattccttggaaagccttggccaaggaataaagtatcacttcaacccctcgcagtccatcctggtgatggaaggtgacgacattgggaacattaaccgtgctctccagaaagtctcctacatcaactccaggcagttcccaacggcgggtgtgcggcgcctcaaagtatcctccaaagtccagtgctttggggaagacgtatgcatcagtatccctgaggtagatgcctatgtgatggtcctccaggccatcgagccccggatcaccctccggggcacagaccacttctggagacctgctgcccagtttgaaagtgccaggggagtgaccctcttccctgatatcaagattgtgagcaccttcgccaaaaccgaagcccccggggacgtgaaaaccacagaccccaaatcagaagtcttagaggaaatgcttcataacttagatttctgtgacattttggtgatcggaggggacttggacccaaggcaggagtgcttggagctcaaccacagtgagctccaccaacgacacctggatgccactaattctactgcaggctactccatctacggtgtgggctccatgagccgctatgagcaggtgctacatcacatccgctaccgcaactggcgtccggcttcccttgaggcccggcgtttccggattaagtgctcagaactcaatgggcgctacactagcaatgagttcaacttggaggtcagcatccttcatgaagaccaagtctcagataaggagcatgtcaatcatctgattgtgcagcctcccttcctccagtctgtccatcatcctgagtcccggagtagcatccagcacagttcagtggtcccaagcattgccacagtggtcatcatcatctccgtgtgcatgcttgtgtttgttgtggccatgggtgtgtaccgggtccggatcgcccaccagcacttcatccaggagactgaggctgccaaggaatctgagatggactgggacgattctgcgctgactatcacagtcaaccccatggagaaacatgaaggaccagggcatggggaagatgagactgagggagaagaggaggaagaagccgaggaagaaatgagctccagcagtggctctgacgacagcgaagaggaggaggaggaggaagggatgggcagaggcagacatgggcagaatggagccaggcaagcccagctggagtgggatgactccaccctcccctactagtgcccaggggtctgctgcccggcccacatgtcccttttgtaaaccctgacccagtgtatgcccatgtctatcatacctcacctctgatgtctgtgacatgtctgggaaggccttctccagcttcctggagcccaccctttaagccttgggcactccctgtgtttcatccatggggaagttccaagaagcccagcatggccatcagtgaggacttcagggtagactttgtcctgtagcccccacttctgccctaagttccccagcatcctgactacctgtctgcagagtttgcctttgttttttcctgcagggaagaaggcccacctttgtgtcactcacctccccaggctcagagtccccaaggccctggggttccaactcactgtgcgtctcctccacacagaccagcaggttctcctatgctgactccaggttgcttcatacaaggagggtggttgaacttcacacacgtaaggtcttagtgcttaacagtttaaaggaaagtccttgttgaggcagaactaagtttacagggaaaggtacacacattctctctctctctctctctctctctgtctatctagttccccagcttggagagcctttccccttgcttctttctgaggccatataagcttataagaaaagtcccaaaccaagaataggtccttggccacaagcagggtctgatcccccatcagagctatctgagcctgcctgtctgggcacctgctgcaaccatgcagctaccctgccaggggcactcagcaaacagaaccacagggcccaggaggcattccacacaggcactgccccaggacaacacaacaaggacagtcacaacaaggacaacaaggacacaacacaacacacaacaagga

SEQ ID NO: 294 - DNA, 1453 bp, Homo sapiens
  CDS (438)..(998)
cccacgcgtccgcttttttgggcactctgccaggcagggtaggagaggtgcctggatggatagggcataattgggccagacagacacggttcttagccttttggagcttaaagtgtcttgagaaacgcagacaggatgtcatgtggcctgtgttttggaccgtggttcgtacctatgctccttatgtcacattccctgttgccttcgtggtcggggctgtgggttaccacctggaatggttcatcaggggaaaggacccccagcccgtggaggaggaaaagagcatctcagagcgccgggaggatcgcaagctggatgagcttctaggcaaggaccacacgcaggtggtgagccttaaggacaagctagaatttgccccgaaagctgtgctgaacagaaaccgcccagagaagaattaatggaggacacagggccctatggtcctactgtgggtggtgacttgtcctgctaccatgttgacagagccccagaacccacatctaattggctttgttgcttattctggcccttcccacaccacacagccacacaaatactggctgctccttgatggccaggcagacccagcagcagccgaggggccagtgaagaggaaggccgcatctgttgtgtggtggccacaagcactcaggcatctgagtttactggtgcactgctgggaggagagttatgagatgaacattggctgtcaatctctgtgggcaggcggtttggcctctagtgggaatggctgggatttgggcgttgcctttaggagggatacctgcatgtctagttccagtctgcactggaaagaattcaaatatgcacctggctcccttcactattttgccctatcctttgtgctcattcttactgaaatctgtcttgtcagctcaggaatgggattcccccaggaaggaaagcacttttctgttctgggaagcccagactgttcactttggggcagggacgaacatgtgcctcgtgaatttgcttgaaaacagtcaccatcttctacccccatcactgtatagtgaaaacacccctggatttaaaaggtgggtaatccctgaagcaaaccaataaccaaaaccaacagacggcaatcaacacgacacaccgcaaacatatgcacaaacagaaaacaacacgcgggggaacaccaattacgggcgtggcgcgaccaaaaaggcgacatgttctacaagtagggaaccacgtgggacatgaaggtgtccagcaagaagcccaatatttggtggtaaacaaagtggtggaaactatgggggggatccccacatcttgggtgcagctgactaatacatcaaccaaacacggggataaaaggcggtttattaaaatctcctaacaacattcgtactggcatcaaacaaaggaggaatcacaacgcttgcacgagaacaacagcagaaacagagcaactgagaga

SEQ ID NO: 295 - DNA, 2716 bp, Homo sapiens
  CDS (277)..(2442)
atcaatgaataagtaaatgagggaatggagaaaatttaaatctttgtggcaaatatcagtagcccaaagaaagaaaatatatgctagtttgaatagaaattatttttcctattatgtccaatttacagaaggatcaagtctcggcctctggattatacctttgttcctcgaacttggatctttcctgctgaatatactcaattccaaaattatgtgaaagaattgaagaaaaaacggaagcagaaaacttttatagtgaaaccagctaatggtgcaatgggtcatgggatttctttgataagaaatggtgacaaacttccatctcaggatcatttgattgttcaagaatacattgaaaagcctttcctaatggaaggttacaagtttgacttacgaatttatattctggttacatcgtgtgatccactaaaaatatttctctaccatgatgggcttgtgcgaatgggtacagagaagtacattccacctaatgagtccaatttgacccagttatacatgcatctgacaaactactccgtgaacaagcataatgagcattttgaacgggatgaaactgagaacaaaggcagcaaacgttccatcaaatggtttacagaattccttcaagcaaatcaacatgatgttgctaagttttggagtgatatttcagaattggtggtaaagaccctgattgtagcagaacctcatgtcctgcatgcctatcgaatgtgtagacctggtcaacctccaggaagcgaaagtgtctgctttgaagtcctgggatttgatattttgttggatagaaaactaaagccatggcttctggagattaaccgagccccaagctttggaactgatcagaaaatagactatgatgtaaaaaggggagtgctgctaaatgcgttgaagctactaaacataaggaccagtgacaaaagaagaaacttggccaaacaaaaagctgaggctcaaaggaggctctatggtcaaaattcaattaaaaggctcttaccaggctcctcagactgggaacagcagagacaccagttggagaggcggaaagaagagttgaaagagagactcgctcaagtacgaaagcagatctcacgagaagaacatgaaaatcgacatatggggaattatagacgaatttatcctcctgaagataaagcattacttgaaaagtatgaaaatttgttagctgttgcctttcagaccttcctttcaggaagagcagcttcattccagcgagagttgaataatcctttgaaaaggatgaaggaagaagatattttggatcttctggagcaatgtgaaattgatgatgaaaagttgatgggaaaaactaccaagactcgaggaccaaagcctctgtgttctatgcctgagagtactgagataatgaaaagaccaaagtactgcagcagtgacagcagttatgatagtagcagcagctcttcagaatctgacgaaaatgaaaaagaagagtaccaaaataagaaaagagaaaagcaagttacatataatcttaaaccctccaaccactacaaattaattcaacaacccagctccataagacgttcagtcagctgccctcggtccatctctgctcaatcaccttccagtggggacacccgcccattttctgctcaacaaatgatatctgtgtcacggccaacttctgcatctcggtcacattccttaaaccgtgcttcctcctacatgaggcatctgcctcacagtaatgatgcctgctctaccaactctcaagtgagtgagtctttgcggcaactgaaaacaaaagaacaagaagatgatctaacaagtcagaccttatttgttctcaaagacatgaagatccggtttccaggaaagtcagatgcagaatcagaacttctgatagaagatatcattgataactggaagtatcataaaaccaaagtggcttcatattggctcataaaattggactctgtaaaacaacgaaaagttttggacatagtgaaaacaagtattcgtacagttcttccacgcatctggaaggtgcctgatgttgaagaagtaaatttatatcggattttcaaccgggtttttaatcgcttactctggagtcgtggccaagggctgtggaactgtttctgtgattcaggatcctcttgggagagtatattcaataaaagcccggaggtggtgactcctttgcagctccagtgttgccagcgcctagtggagctttgtaaacagtgcctgctagtggtttacaaatatgcaactgacaaaagaggatcactttcaggcattggtcctgactggggtaattccaggtatttactaccagggagcacccaattcttcttgagaacaccaacctacaacttgaagtacaattcacctggaatgactcgctccaatgttttgtttacatccagatatggccatctgtgaaacagaagggaagatcgccattggttatacataacagcaattcatttttttcctctgaagttgaacatgcaaagaacatgaccattaagtgctgttttatgtatataagacatatatatgtgtgaaaatatatgcacatatgcaccctaataacatatatttattatattaaatgatatatgaaagaagaattagcagaaaatggaatataagacttaacctttctggaaacgtaataaaccatgttaaaattgtttacacaaaaaaaaaa

SEQ ID NO: 296 - DNA, 439 bp, Homo sapiens
  CDS (81)..(431)
gtcgggcggctccacagagcccttaggcctttccgccttccccaagccaacgtctccgccgtcggctccgcggcgccgccatggccgacgtggaagacggagaggaaacctgcgccctggcctctcactccgggagctcaggctccaagtcgggaggcgacaagatgttctccctcaagaagtggaacgcggtggccatgtggagctgggacgtggagtgcgatacgtgcgccatctgcagggtccaggtgatgggtaagcgctgcacgcgagtccagggccgccctgcggcctccgggagccgacctcggggttgggaagggacgggcgtccgtcagaagcctcggaaagtgccctgcctgggagagtgggtggaggtcgccctgccccggcgccggaggaacgcggagccacgctcctgctgcggctcctgagggct

SEQ ID NO: 297 - DNA, 1632 bp, Homo sapiens
  CDS (107)..(973)
tttcgtggcgaacgaggccccacctctgccgggagcgggacgagcgcgcaggcgcagtctccccaggttgtagacgctgcggcccggcccggcgggtaaataacagatgcgggtgaaagatccaactaaagctttacctgagaaagccaaaagaagtaaaaggcctactgtacctcatgatgaagactcttcagatgatattgctgtaggtttaacttgccaacatgtaagtcatgctatcagcgtgaatcatgtaaagagagcaatagctgagaatctgtggtcagtttgctcagaatgtttaaaagaaagaagattctatgatgggcagctagtacttacttctgatatttggttgtgcctcaagtgtggcttccagggatgtggtaaaaactcagaaagccaacattcattgaagcactttaagagttccagaacagagccccattgtattataattaatctgagcacatggattatatggtgttatgaatgtgatgaaaaattatcaacgcattgtaataagaaggttttggctcagatagttgattttctccagaaacatgcttctaaaacacaaacaagtgcattttctagaatcatgaaactttgtgaagaaaaatgtgaaacagatgaaatacagaagggaggaaaatgcagaaatttatctgtaagaggaattacaaatttaggaaatacttgcttttttaatgcagtcatgcagaacttggcacagacttatactcttactgatctgatgaatgagatcaaagaaagtagtacaaaactcaagatttttccttcctcagactctcagctggacccattggtggtggaactttcaaggcctggaccactgacctcagccttgttcctgtttcttcacagcatgaaggagactgaaaaaggaccactttctcctaaagttctttttaatcagctttgtcagaagtgggtgcatctacatttaatataaataattatgagttacaaaatactaatgtattcatcatttaacatgaatagtcgtttttactgtaactttgctcttattgccctgactatgaagagaactaaaatttgttacagctctatgctttatgaaaattatatctcagtcctcagaagaagcagcttatcctcatatataaggaaatggagacacagaaattaaatggctcacctagtctgagtgaaaagctgagaatcaaatggagatctgtcctgacttggatgcctatgttgtaataccataaagtgagaaaaccatagagttgtaaaatctagaaagtaccgtaagataacatctaatctagctttcttattttaaaagatgagctgtgaggcaaatagagtttaagtgaatttctcaaggtattacagtatgtttaaaaaccaaatccttatgtgcctggaaataaacacataaaggatctgacttgactttaatgcattcatgtattcatttatataaaaaattgagagcttgctttttatgaggtacttgctacaattcaggggtacacaacatatattgcgccacaaatgcaccctgtcctcatggaactcacaagatagtccagtccacaattactaaaatatgtagaaggaaaaacgaaatcgtgacagcga

SEQ ID NO: 298 - DNA, 2118 bp, Homo sapiens
  CDS (324)..(1544)
ggtggagacagcggctgaaatggaagcatatgttctagaagacattcttgaggtggagtctttcattttggatcaggatgatttggaaaatccaatgctggaaacagcttccaagttgctcttatcaggtactgctgatggtgcagacctcaggacagtagatccagaaacacaggctagactggaagctttactagaagctgcaggaataggaaaattgtccacggctgatggtaaagcctttgcagatcctgaagtacttcggaggttgacatcgtctgttagttgtgcgtttggatgaagctgctgctgcacttacccgtatgagagctgaaagcacagcaaatgcagggcagtcggacaaccgcagtttggcagaagcctgttcagaaggagatgtaaatgctgtgcgaaagttactcattgaagggcgaagtgtaaatgaacacacagaggaaggggagagcctccttcgtctagcttgttctgctggatactatgagcttgcacaggttttgttggcaatgcatgcaaatgtggaagataggggaatcaaaggtgacattacacctttaatggctgctgctaatggaggacatgtcaaaattgtgaagttgctgctagctcataaagcagatgttaatgcacagtcttcaacaggcaatacagcacttacatatgcttgtgctggaggctatgtagatgttgtaaaggtgctcttggaatccggtgctagtattgaggaccataatgaaaatggtcatacccctcttatggaagctggaagtgctggacatgtggaagtagccagattgctgctagaaaatggggctggcattaatacgcattctaatgaatttaaagagagtgcccttaccttagcttgttacaaaggacacttagagatggtgcgatttcttttggaagcaggcgcggatcaagagcataaaacagatgaaatgcacactgctctgatggaggcttgcatggatggccatgttgaagtagctaggttacttcttgacagcggtgcccaagtgaacatgcctgctgattcatttgagtcaccattaactttggctgcatgtggtgggcatgtggaacttgcggctttacttattgaaagaggagctagcctggaagaggtcaatgatgaaggttatacaccattgatggaagcagctcgagaaggacatgaagaaatggtggcattacttcttggtcaaggagcaaatatcaatgcacagacagaagaaactcaagaaactgccttgactctggcttgctgtggaggctttctggaagtggcagactttctaattaaggcaggagccgatatagaactagggtgttctacccctttaatggaagctgctcaagagggtcatttggagttagttaaatacttattagctgcaggagctaacgttcatgcaacaacagcaacaggggatacagcactaacatatgcctgtgaaaatggtcatactagtatgtcgcagatgtcttacttcaggcagtgcgcagatctggaacatgaactctgagaggtggaagcaactcctttatatgaaagctgcaaggagctggtcatgttggtactgttcaggttcttaattagtaaaggagcgaactgtgaatagaaccaaggtaataatgacgcatactgtactgtaccctggcttgtgcagggggtcatctggcagtggtggaactacttttggctcatggggcagatcctactcagccgtttgaaagatggctcagctatagttggatagaagcagcaaaaggtggccatacaagtgtgatagctatctcttggattatcctaataacttgctttcaggcccctccgaccagatgtcgactccaggtttaagttccccccatccccaggcagtttacaataggggctccgcgatggttagccagctttcaaagcgattggcccaattgggtatgtatccaaccttcccagggagcccttgaagaaaagcatccttggcccaaattgttaggcgacccacttctttccccatgcaggagattaaaggacgccagctggaatgaagccatctctggcaagtgccaaagctcctaacccaacaggacttg

SEQ ID NO: 299 - DNA, 1533 bp, Homo sapiens
  CDS (619)..(795)
  misc_feature (1)...(1533): n = a,t,c or g
aagccccacgcgcgccccctgaannccttaactgaggaaatgncgcaaccacgannacgccaagcttggcacgaggagagtgaatggtggagggtgggaagggacccagatttgtagatctctttgtctgggggaggggaaggatgtggtttgcagagcggaagcagagtttggaaacgcatgagagcagagcttcgtgtgttcccaccctcagtgaggaggtgtgagtgggtgagcatgtggagttgggtgttcccaccctcagtgaggaggtgtgagtgggggtgcatatagaggcagtgcctgctgtggggtcacaactggtgcatgccagcgccaaagggacctgtctttaggggtcatttcagccagctcctcccatcacagatgacagctccaagcctagaaggggctcagtgacagggccaggacaagccctcaggactgtggcctcctggcccttggttcccctgccccacaacatggtctccacatggctggctggctggctgtccctgtgtgtgtgtgacacacggtgtgagtgcagggctgtgcccggggtgggagggtgtctatgtggcactgactgtcttagctcagagctggtggatcctctccatggacaatgacactttaaggattgtcttggtttgtttttcctatttgtggggtattttccccctcaggctcctgggtctgctgctgcctcaaggtgtcctgaccttgaggctgatgaggggacccctgcctgtttcccccatactgagttctagggaggtgctcaccccagactcttaggaagggtctagagaaatgagaggagcccaagccaggggccagctccgagaaagggtaacctccacgcttctctctcccaaattggaaatgaagacaggttttcaaaggcacaggctccccctgccagcttctaggatcttccttggtgtgcaatgggccagttaggggtaggcagcttgcacccagttctcctttatctcaacttattttcctggggagaggtgcctagagggattgaggtaacttcaactgggaattccaaggaaggtgggcaagtagccttggctctctcccaccatgtccatcaggattgagagtgtgtctagctcccgaccactttgtcttgacctactgaaaagttgggaactgaggggtgccttcattcccctttgttcactttctccagctcaacttgggacttgggtggtgggactggagacctcacccctgctcccgtcccgccccctttctatcccaacctgtttccatgtagcagacccttcctagggagcagggaggggaagccacagattgcaaacccaggggctcctttttcattctttctaaaaccttgatatcctcagcccaaaggcgatgcccccctgccacctccaagcctggaattgtgcataacccggatcttgtatctttgtataacggatgttatttgtacgaagggcagttcgtaaacagcacttgttcttttaataaaagaatgttttgcaaaaaaaaaaa

SEQ ID NO: 300 - DNA, 942 bp, Homo sapiens
  CDS (52)..(807)
tcctccttgctgcctgccggccctctgtctgcaacgcctgctggcctctgcatgggcagaagtcctccagctctgcatcttccgaggcctcggaaacctgccagtccgttagcgagtgcagctcccccacctcggactggtccactggtcggctcccatgagcagccctcaggcgccactctgcagcggaggaaggaccgagtggagctcctgcgagacacagagccaggccctgccagtgggggcaccctgggccccagcggggaagaggcaccgcgaccccggatgtcccctgccaccatcgcagccaagcacggtgaggaggtgtcccccgccgccagtgacctggccatggtgctgacgcggggcctgagcctggagcaccagaagagcagccgggactcgctgcagtactccagcggctacagcacgcagaccaccacgccctcctgctctgaggacaccatcccctcccaaggctccgactacgactgctactccgtgaatggggatgcggacagcgagggcccgcccgagtttgacaagtcatccaccatcccgcgcaacagcaacatcgcccagaaactaacgcgccatgatccagaccaagcgccagacctccactgcgtgggctgccaccgggggatggccacgggcaatggcctagccctcggggcgcacccccccggaggtgagcaaacatccaggcagaacaacactccaacaagccacggtgcgcagcgcctgcaagcgcacggcccatcccaatactggacgcccatcggccctgtaagacgcacacggtgctgatacaacgggtaactggagcacacacgacgagaagtaggatggctataaaacacagaaaaccgatcccctagaccggatctgaagagccccaaaggaagatgcacaagcagggcgctacccagggccgcaccg

SEQ ID NO: 301 - DNA, 1824 bp, Homo sapiens
  CDS (29)..(1465)
ccgggtcccggagccggctgtctgagggatggacgagacgagcccactagtgtcccccgagcgggcccaacccccggactacaccttcccgtcgggctcgggcgctcactttccgcaggtgcccgggggcgcggtccgagtggcggcggcggccggctcgggcccctctccgccgggctcgccgggccacgaccgcgagcggcagccactgttggatcgggcccggggcgcggcggcccagggccagacccaaaccgtggcggcgcaggcccaggctctggccgctcaggccgcggcggcagcccacgccgctcaggcccaccgcgagcggaacgagttcccggaggatcctgagttcgaggcggtggtgcggcaggccgagctggccatcgagcgctgcatctttcccgagcgcatctaccagggctccagcggaagctacttcgtcaaggaccctcaggggaggatcattgctgtcttcaaacccaagaatgaagagccctatgggcatcttaatcctaagtggaccaagtggctgcagaagctgtgctgtccttgctgctttggccgtgactgccttgtccttaaccagggctatctctcagaagcaggggccagcctggtggaccaaaaactggaactcaacattgttccccgtacaaaggtagtatacctggccagtgagaccttcaactatagtgccattgaccgagtgaagtccaggggcaagcggcttgcactagagaaagtgccaaaagttggacagcggtttaaccgcatcgggctaccaccaaaggttggttcattccagctctttgttgaaggctacaaagatgcagactattggctgcggcgttttgaagcagaacctcttcctgagaacactaaccggcaactactgctccagtttgagcggttggtggtgctggattacatcatccgcaacactgatcgaggcaatgacaactggctgattaaatatgactgtccaatggatagttctagctctcgggacacagactgggtggtggtgaaggagcctgttatcaaggtggctgccatagacaatgggctggccttcccactgaagcatcctgactcctggagggcatatcctttttactgggcctggttgccccaggcgaaagtcccattttctcaggagatcaaagatctgatccttccaaagatatcggaccctaacttcgtcaaggacttggaagaggacctatatgaactcttcaagaaagatcctggtttcgacaggggccagttccataagcagattgctgtcatgcggggccagatcttaaatctgacccaggccttgaaagacaacaagagtcccctgcacctcgtccagatgccacctgtgattgtcgagacggcccgttcccaccagcggtcttctagcgagtcctacacacagagctttcagagccggaagcccttcttttcatggtggtagctccagaggcaggcagaggaaatattgtcagagactggtgggaggaagcctggggagtggggtgcaggaaaagccagagaagccggtggagagcagcacctttaagagccctctctctctgcttgccaccctgctcagagctttccacccacagggagaagcacaatcaggaacagtgagtgctcctcgcccttctgatgtgggggaggctggagctccatgcacgtagtccagatgcctgggaaggaacatctcccttccagcatctgctggtagcaggctgggacagtcccttccttccctgaaaccctgctctattgcaattccctattatattctgcatcagaaaaaaaaaa

SEQ ID NO: 302 - DNA, 3348 bp, Homo sapiens
  CDS (68)..(2914)
cgtcactagcagtttctggagctacttgccaaggctgagtgtgagctgagcctgccccaccaccaagatgatcctgagcttgctgttcagccttgggggccccctgggctgggggctgctgggggcatgggcccaggcttccagtactagcctctctgatctgcagagctccaggacacctggggtctggaaggcagaggctgaggacaccagcaaggaccccgttggacgtaactggtgcccctacccaatgtccaagctggtcaccttactagctctttgcaaaacagagaaattcctcatccactcgcagcagccgtgtccgcagggagctccagactgccagaaagtcaaagtcatgtaccgcatggcccacaagccagtgtaccaggtcaagcagaaggtgctgacctctttggcctggaggtgctgccctggctacacgggccccaactgcgagcaccacgattccatggcaatccctgagcctgcagatcctggtgacagccaccaggaacctcaggatggaccagtcagcttcaaacctggccaccttgctgcagtgatcaatgaggttgaggtgcaacaggaacagcaggaacatctgctgggagatctccagaatgatgtgcaccgggtggcagacagcctgccaggcctgtggaaagccctgcctggtaacctcacagctgcagtgatggaagcaaatcaaacagggcacgagttccctgatagatccttggagcaggtgctgctaccccacgtggacaccttcctacaagtgcatttcagccccatctggaggagctttaaccaaagcctgcacagccttacccaggccataagaaacctgtctcttgacgtggaggccaaccgccaggccatctccagagtccaggacagtgccgtggccagggctgacttccaggagcttggtgccaaatttgaggccaaggtccaggagaacactcagagagtgggtcagctgcgacaggacgtggaggaccgcctgcacgcccagcactttaccctgcaccgctcgatctcagagctccaagccgatgtggacaccaaattgaagaggctgcacaaggctcaggaggccccagggaccaatggcagtctggtgttggcaacgcctggggctggggcaaggcctgagccggacagcctgcaggccaggctgggccagctgcagaggaacctctcagagctgcacatgaccacggcccgcagggaggaggagttgcagtacaccctggaggacatgagggccaccctgacccggcacgtggatgagatcaaggaactgtactccgaatcggacgagactttcgatcagattagcaaggtggagcggcaggtggaggagctgcaggtgaaccacacggcgctccgtgagctgcgcgtgatcctgatggagaagtctctgatcatggaggagaacaaggaggaggtggagcggcagctcctggagctcaacctcacgctgcagcacctgcagggtggccatgccgacctcatcaagtacgtgaaggactgcaattgccagaagctctatttagacctggacgtcatccgggagggccagagggacgccacgcgtgccctggaggagacccaggtgagcctggacgagcggcggcagctggacggctcctccctgcaggccctgcagaacgccgtggacgccgtgtcgctggccgtggacgcgcacaaagcggagggcgagcgggcgcgggcggccacgtcgcggctccggagccaagtgcaggcgctggatgacgaggtgggcgcgctgaaggcggccgcggccgaggcccgccacgaggtgcgccagctgcacagcgccttcgccgccctgctggaggacgcgctgcggcacgaggcggtgctggccgcgctcttcggggaggaggtgctggaggagatgtctgagcagacgccgggaccgctgcccctgagctacgagcagatccgcgtggccctgcaggacgccgctagcgggctgcaggagcaggcgctcggctgggacgagctggccgcccgagtgacggccctggagcaggcctcggagcccccgcggccggcagagcacctggagcccagccacgacgcgggccgcgaggaggccgccaccaccgccctggccgggctggcgcgggagctccagagcctgagcaacgacgtcaagaatgtcgggcggtgctgcgaggctgaggccggggccggggccgcctccctcaacgcctcccttgacggcctccacaacgcactcttcgccactcagcgcagcttggagcagcaccagcggctcttccacagcctctttgggaacttccaagggctcatggaagccaacgtcagcctggacctggggaagctgcagaccatgctgagcaggaaagggaagaagcagcagaaagacctggaagctccccggaagagggacaagaaggaagcggagcctttggtggacatacgggtcacagggcctgtgccaggtgccttgggcgcggcgctctgggaggcaggatcccctgtggccttctatgccagcttttcagaagggacggctgccctgcagacagtgaagttcaacaccacatacatcaacattggcagcagctacttccctgaacatggctacttccgagcccctgagcgtggtgtctacctgtttgcagtgagcgttgaatttggcccagggccaggcaccgggcagctggtgtttggaggtcaccatcggactccagtctgtaccactgggcaggggagtggaagcacagcaacggtctttgccatggctgagctgcagaagggtgagcgagtatggtttgagttaacccagggatcaataacaaagagaagcctgtcgggcactgcatttgggggcttcctgatgtttaagacctgaaccccagccccaatctgatcagacatcatggactcgcccagctctcctcggcctggggctctggccaaggatgggctggaggtcattcagttggtctgtctcttccctggaaaccttctgcaaagatggtgtggtgtacgtggcttccctgtaaccacatggggcttggccatttctccatgatgagaaggactggaatgcttctccgggcaggacatggtcctaggaagcctgaaccttggcttggcatgccttctcagacagcacgtgctgtgctccaactcttcaccacaccctgtattctacaacttctttggcgttttactcctcctagtgctcgaaacttgtgtccggcgatttcagcccccgctctgccttcctcctctcttctcccttacctgatcatcccaccaccttctcccccaggatct

SEQ ID NO: 303 - DNA, 802 bp, Homo sapiens
  CDS (400)..(609)
attggctaaaaacaaatcaattttcttcttggcataaagtgtttcattattataggggtgttcattttaaatagtttaaaaacaattgcagcacattctaagcataagagaaagttattgacaacaggtaccttcctaatctcccaagacgtacttactcatttgtgaagtattaaagtaagaggtaactcaagcagaatgctggctatgaatgtagatattgaatctattcataaacactggaaatagaattttaagcttttagccttcagtggaatgcacatattggacatgtgcatgtgaacacctttttcagtagcactcacggatttccattcgattgtatagaatgaatacaagtgttttagtggaatttgctacttaatttttaatcttgcgatgtccgtgattattacatgcttactagtgttgtggacattgaagacaaggtcattcgtaggtgtcagattacaatggagaacaaaaatcgttttccccccacccacatccaaacaccattctcgagggagcatttcttgcaaaacaccttacatttcattttctatctttgcactttttcttaagtacagaaaagttgtctttaagacctagtttgaacttcatgcagtaagaggaacaaggataaacaatgttgggagttcacattgttcagagcataaggaaaagtaccaaaacccaaattttcttgaatatttcagatgtttttaaaaactcacttctagtctgaaacatttgaattgttttaactctgagcagctgacaaagttgaggtttttttgtt

SEQ ID NO: 304 - DNA, 3818 bp, Homo sapiens
  CDS (757)..(2529)
caattttttttttttttttttttttcatgaaaaattctaatttcattcatgttgctacaagtatagcttcatgctttaaaaaaaaatgcgggctggtaacatttttctatcttacttacagtgtagagttaaacaggtgcccttacctctcctccagtgcatggaaaaggactggagtatttagaagtacaaatagcgcccttcttgacaacatcatcttccaggccaaatgtagcggagcagttagtcgcaaagtacttataaggcttccatgttttcccaaagtcctgggagcggtccagcaccatggcagccggcctgggggacttgaacatcacaattaggtgagtgaagtagaattcagcttccaggtctaactggatcttttctctgtgcacatcctccgcagactgccaccatgtgcgaggaaaccggaaggatgagtctgccatggcagatgccaggtgagccaggtgaggataggcagcatcgcacttgtcacatttggactgccgacaagtcagatccgtgttctcactgtagaagcagtacagttcggtagcattctgaccacagtggtggtctgcccagagttttcgccccaaagcgaaatttcccatccgaggggtgcagctttttcacagcgggaactcactccagtactccactcagtcctggggctgcacggtggtggccgcaggactgagtggagtagctggagtgagttcccgctgtgaaaaagcctgcaaccctcggatgggaaatttggctttggggcgaaaactctgggcagacaccacctgcggtcagaatgctaccgaactgtactgcttctacagtgagaacacggatctgacttgtcggcagcccaaatgtgacaagtgcaatgctgcctatcctcacctggctcacctgccatctgccatggcagactcatccttccggtttcctcgcacatggtggcagtctgcggaggatgtgcacagagaaaagatccagttagacctggaagctgaattctacttcactcacctaattgtgatgttcaagtcccccaggccggctgccatggtgctggaccgctcccaggactttgggaaaacatggaagccttataagtactttgcgactaactgctccgctacatttggcctggaagatgatgttgtcaagaagggcgctatttgtacttctaaatactccagtccttttccatgcactggaggagaggttattttcaaagctttgtcaccaccacacgatacagagaacccttacagtgccaaagttcaggagcagctgaagatcaccaaccttcgcgtgcagctgctgaaacgacagtcttgtccctgtcagagaaatgacctgaacgaagagcctcaacattttacacactatgcaatctatgatttcattgtcaagggcagctgcttctgcaatggccacgctgatcaatgcatacctgttcatggcttcagacctgtcaaggccccaggaacattccacatggtccatgggaagtgtatgtgtaagcacaacacagcaggcagccactgccagcactgtgccccgttatacaatgaccggccatgggaggcagctgatggcaaaacgggggctcccaacgagtgcagaacctgcaagtgtaatgggcatgctgatacctgtcacttcgacgttaatgtgtgggaggcatcagggaatcgtagtggtggtgtctgtgatgactgtcagcacaacacagaaggacagtattgccagaggtgcaagccaggcttctatcgtgacctgcggagacccttctcagctccagatgcttgcaaaccgtgttcctgccatccagtaggatcagctgtccttcctgccaactcagtgaccttctgcgaccccagcaatggtgactgcccttgcaagcctggggtggcagggcgacgttgtgacaggtgcatggtgggatactggggcttcggagactatggctgtcgaccatgtgactgtgcggggagctgtgaccctatcaccggagactgcatcagcagccacacagacatagactggtatcatgaagttcctgacttccgtcccgtgcacaataagagcgaaccagcctgggagtgggaggatgcgcaggggttttctgcacttctacactcaggtaaatgcgaatgtaaggaacagacattaggaaatgccaaggcattctgtggaatgaaatattcatatgtgctaaaaataaagattttatcagctcatgataaaggtactcatgttgaggtcaatgtgaagattaaaaaggtcttaaaatctaccaaactgaagattttccgaggaaagcgaacattatatccagaatcatggacggacagaggatgcacttgtccaatcctcaatcctggtttggaataccttgtagcaggacatgaggatataagaacaggcaaactaattgtgaatatgaaaagctttgtccagcactggaaaccttctcttggaagaaaagtcatggatattttaaaaagagagtgcaagtagcattaagatggatagcacataatggcacttgtctatgtacaaaacacaaactttagagcaagaagacctcagacaggaaactggaattttttaaagtgccaaaacatatagaaatgtttgaatgcatgggtcttatctaacttatctcttctggacccatgtttaaatacagttttatttcatgaagagaaatgaaaacccctacactgatatctgttttctatgggactgattctgaaattcttaactattaagaatattttaatagcagcatgacatttagcagtaatccattaagggcagtacctctaacaaggacgccttccagcttcagcgatgttacttacgtttgatgctacttaaagtaatgaatgacgttttaaggaatccctaaccctactatcagaaaaggtgtttgttaaagagccttctcttgtgtgttacgcatgaactttggtctgtaggtgttaaatggaacctctccatgtgtatatagtatttccttgtataaagcactttactacctaccacttgtgttgtgaacgtttggtgactgctgttgaaagaaggaaaagggtgtgtgagaaagcctactgaagcagcagcactgccactacatgtggacaaaagtgaccatataaaagaagttgtgctatttaactctgaatacttggagaaactaggtgaagatgcaaccagaaaggagaatatgtatgcgtgaagtctcagctttgagctggaggctagattccaagatgacagccatgatgaaactttttaaaaaactaaaccagaagagactttaaaataagagaaagaaatcataaatgtagacatatgcttggctaaaggggaaatggactttaaattttaaagagctcatttgcaatgcacttgtatacacttcaaaaattattgtagacacagaatttgttatatttttgtgcttagtatttaaacctgaacattgaaacagttctcctccctgtctttcttaacagtaatagtcattatatttacctgttttttaacacaatgtatgtgatagtcaaaaaatcacagtttttcattattattcatcttctgtacccacgcataaccactatacatagtttcttttgtacttgaatatacaaaacatgaacacagtgccatatgaataatttcacatacagaacctttttttctctgaagtcctgtggacttgcaaatatatatatattgctttgttaatttgtttttatatttcatatatgtaataaaggaatatgatctgaaaaaaaaaa

SEQ ID NO: 305 - DNA, 723 bp, Homo sapiens
  CDS (19)..(429)
gatggggcggcgccgagaatggccgttatgaggaccctaagagccatggccatgcagaaaatctttgcccgggaaatcttggactccaggggcaaccccacggtggaggtggacctgcacacggccaagggccgattccgagcagctgtgcccagtggggcttccacgggtatctatgaggctctggaactaagagacggagacaaaggccgctacctggggaaaggagtcctgaaggctgtggagaacatcaacagtactctgggccctgctctgctgcaaaagaaactaagcgttgcggatcaagaaaaagttgacaaatttatgattgagctagatgggaccgagaataagtccaagtttggggccaatgccatccaagggccgattccgagcagctgtgcccagtggggcttccacgggtatctatgaggctctggaactaagagacggagacaaaggccgctacctggggaaaggagtcctgaaggctgtggagaacatcaacagtactctgggccctgctctgctgcaaaagaaactaagcgttgcggatcaagactggcgcccctgccgctcggagcgtctggccaaatacaaccaactcatgaggatcgaggaggctcttggggacaaggcaatctttgctggacgcaagttccgtaacccgaagccaagtgagagctggagctccagactcactggacaaccaggtctcagcct

SEQ ID NO: 306 - DNA, 390 bp, Homo sapiens
  CDS (80)..(364)
tgtcctggaattcttctttctgagttcccatttcacagatgggtaaaactgaggtttactcctcgtctagcttcactgaatggcagagcccatagcttgtctttgcctaatctgctgcataatcatttcagcaacaactcaaatgccttttgagggttcttgcttctgtttggtgccttgtaattttcaaccatattttagacactttaggcctaatgatctaaggcatatggtttttacccatggtctgtgggcccttgagaagctgagtcctctgaaagaaaatcagaatgttgcatgcatctgtattttttgtcttagatttcacttgattctcaaatggatccttgactcccccaaagtttaatttattcaacaaatctttttttt

SEQ ID NO: 307 - DNA, 1495 bp, Homo sapiens
  CDS (580)..(1137)
ttttttttcgctcgtgtcccgccgggtggcgctcaccacctccccggaacacgcgagtctcctgtcgcggttccggtcggaattaccccgtggagcacgccgatatggctgcgctgacactgaggggtgtccgggagctgctgaagcgtgtggacctcgcgacggtcccgcggagacatcgatataagaagaaatgggctgccacagagcccaaattccctgctgttcgactggctttgcagaattttgacatgacttacagtgtgcagtttggagatctttggccatcaatccgtgtcagtctcctctcagagcagaagtatggtgcactggtcaataactttgctgcctgggatcatgtaagtgctaagctggagcagctgagtgccaaggattttgtgaatgaagccatctcccactgggaactgcagtctgagggtggccaatctgcagccccatcccctgcctcctgggcctgcagtccgaaccttcgatgcttcacttttgacagaggggatatcagtcgcttccctcctgccagacctggcagcctgggtgtcatggagtactacctgatggatgctgcctccttgctgcctgttctggccctcggcctgcagcctggggacatcgtgcttgacctatgtgcctgaagagatcagggatggaaatcaagttcgagttacctcatgggatggcaggaaatggggagaactggagggggacacctatgaccgggtgctggtggatgtgccctgtaccacagaccgccactcccttcatgaggaggagaacaacatctttaagcggtcaaggaagaaggagcgacagatattgcctgtgctgcaagtgcagcttcttgcggctggactccttgccaccaaaccaggaggccatgttgtctattctacctgctcactctcacacttacagaacgagtatgtggtgcaaggtgccattgagctcctggccaatcaatacagcatccaggtacaggtggaagatctgactcacttccgaagggttttcatggacacattttgtttcttctcatcctgtcaggttggggagctggtaataccaaacctcatggccaattttggccccatgtacttctgcaaaatgcgtaggctgacatagtatcacccaatccctgaagcaagaatacaaagggtatactctgttggatgcaccagaaactggaaactgggaccagtggcagagatgcactctcggtcctgtctccatcctgttcgtgtctttctgcagttttcggcaataagaagtagaagatttgctgtcctgctgtccaattgtggagcatcagcaggtttccaactcactcattaacccctaccccatctccaggcctgtactaaagtttgctgcccgcttaggggcttagaaggagaagccagtgagcaggctcacactaagttgtaaacataggagaagcatttggccaataaagttgttgaaactctaaaaaaaaaaa

SEQ ID NO: 308 - DNA, 961 bp, Homo sapiens
  CDS (65)..(553)
cacccacggttggccgcggagccgagtgctgacccgggtgagaggttcccgcggctcagggaagatggcggcagccgtggtgctggctgctgggttgcgcgcggcgcgcagagccgtggcggccacgggggtgcgcggggggcaggtccgaggagctgcaggtgtgactgatgggaatgaagtggccaaggcccagcaggcaactcctgggggagcagccccaaccatcttctcccggatcctggacaagagcctcccagctgacattctctatgaggaccagcagtgtcttgtgttccgtgatgtggcccctcaggctcctgtgcacttcctggtcattcctaagaagcccattcctcggattagccaggctgaagaagaagaccagcagcttctaggacacctactccttgtggccaagcagacagcaaaggctgagggcctgggagatggataccgacttgtgatcaacgatgggaagctgggtgcacaatctgtgtatcatctgcacattcatgtacttgggggccggcagctccagtggcctccaggttgaacctgccaactgattaaaggacaccagactctggatgcttggatggaaagggaaaaatggaccctgtgatgctaataaaactgttctcccttaaaaaaaaagtaagtaaagatcaggaacactgggaagtagttttctctggaagcacgacccgggggggggggagaacccaccgcgctaaggggcggaagggggcacacaagggggtgtcgcccctttccacaggtcggtgtcgtgcgaaccaccggttgtgtcaaaaaattggagacggcgcccggcccggagcatctgttcgtccagggggggagcagctggctggcaaaaggcgtaaacccgaggcgaggggaaagcggacagggggtccgcaggtgcacgacacgacacacactccggcggacccacccg

SEQ ID NO: 309 - DNA, 940 bp, Homo sapiens
  CDS (68)..(559)
tttcgtgtttgggggggttggcgacggcagcccgagggcggcgcaaggcctgaggcccagcacagtgatgtccgagctcagcgatgaagccagcgagccggaactcctgaaccgcagcttgtccatgtggcacgggctcgggacacaggtcagcggggaggagctggatgtccccctggatcttcacacagctgcttccattggccagtatgaagtggtgaaggagtgtgtgcagcggagagagttagatttgaataagaagaatggtggtggctggaccccgctgatgtatgcctcctacattggccacgacacaatcgtgcacctgctgcttgaggcgggggtgagtgtgaatgtgccgaccccagaagggcagactccactgatgctggcctccagctgtggcaacgagagcatcgcctactttcttctccagcaaggtgcagagctagaaatgaaagacatccagggctggacagccctcttccactgtaccagcgccgggcaccagcacatggtcaggttcctcttggacagtggagccaatgccaacgtgaggtgattgccacatctttagtggccacaggagtggcctaggtgtcatctgactctaaggagggtggctctggaggcagctaaccagagtttagggccaccctgcttcggcacgagaggctcaagatgaggggtaggaccagagtccttccaggcacaggccttttcgtacatctgtgagatgcatctcttcaagccctctcagcttccttttctttatctgaaacccacctgggtcatacagttgtaagaattacatgttttattgtatgccagggacctaacatactgaatggcatttaaatgtcatacattacatgcaaattccttccattttcttgctttttgtatggatgaggtgaggtgatgctttgaaacagtcatg

SEQ ID NO: 310 - DNA, 1189 bp, Homo sapiens
  CDS (365)..(1186)
gccggctcagcctctcacttgtcagaggccggggaagagaagcaaagcgcaacggtgtggtccaagccggggcttctgcttcgcctctaggacatacacgggaccccctaacttcagtcccccaaacgcgcaccctcgaagtcttgaactccagccccgcacatccacgcgcggcacaggcgcggcaggcggcaggtcccggccgaaggcgatgcgcgcagggggtcgggcagctgggctcgggcggcgggagtagggcccggcagggaggcagggaggctgcagagtcagagtcgcgggctgcgccctgggcaagaaggccgccctcgctccacgcaacacctgctgctgccaccgcgccgcgatgagcccgcgtggtctcgctgctgctgggcgccgcgctgctctgcgggccacggagccttctgccgccgcgtggtcagcggccaaaaggtgtgttttgctgacttcaaggcatccctgctacaaaatggcctacttccatgaactgtccagccgagtgagctttcaggaggcacgcctggcttgtgagagtgagggaggagtcctcctcagccttgagaatgaagcagaacagaagttaatagagagcatgttgcaaaacctgacaaaacccgggacagggatttctgatggtgatttctggatagggctttggaggaatggagatgggcaaacatctggtgcctgcccagatctctaccagtggtctgatggaagcaattcccagtaccgaaactggtacacagatgaaccttcctgcggaagtgaaaagtgtgttgtgatgtatcaccaaccaactgccaatcctggccttgggggtccctacctttaccagtggaatgatgacaggtgtaacatgaagcacaattatatttgcaagtatgaaccagagattaatccaacagcccctgtagaaaagccttatcttacaaatcaaccaggagacacccatcagaatgtggttgttactgaagcaggtataattcccaatctaatttatgttgttataccaacaatacccctgctcttactgatactggttgcttttggaacctgttgtttccagatgctgcataaaagtaaaggaagaacaaaaactagtccaaaccagtctacactgtggatttcaaagagtaccagaaaagaaagtggcatggaagtataa

SEQ ID NO: 311 - DNA, 1331 bp, Homo sapiens
  CDS (107)..(1114)
aaggatccttaattaaattaatccccccccccgctctgctcctcctgttcgacagtcagccgcatcttcttttgcgtcgccagccgagccacatcgctcagacaccatggggaaggtgaaggtcggagtcaacggatttggtcgtattgggcgcctggtcaccagggctgcttttaactctggtaaagtggatattgttgccatcaatgaccccttcattgacctcaactacatggtttacatgttccaatatgattccacccatggcaaattccatggcaccgtcaaggctgagaacgggaagcttgtcatcaatggaaatcccatcaccatcttccaggagcgagatccctccaaaatcaagtggggcgatgctggcgctgagtacgtcgtggagtccactggcgtcttcaccaccatggagaaggctggggctcatttgcaggggggagccaaaagggtcatcatctctgccccctctgctgatgcccccatgttcgtcatgggtgtgaaccatgagaagtatgacaacagcctcaagatcatcagcaatgcctcctgcaccaccaactgcttagcacccctggccaaggtcatccatgacaactttggtatcgtggaaggactcatgaccacagtccatgccatcactgacaccagaagactgtggatgggccctccggggaaactgtggcgtgatggccgcggcggcctctcccagaacatcatccctgcctctactggcgctgccaaggctgtgggcaaggtcatccctgagctgaacgggaagctcactggcatggccttccgtgtccccactgccaacgtgtcagtggtggacctgacctgccgtctagaaaaacctgccaaatatgatgacatcaagaaggtggtgaagcaggcgtcggagggccccctcaagggcatcctgggctacactgagcaccaggtggtctcctctgacttcaacagcgacacccactcctccaccttcgacgctggggctggcattgccctcaacgaccactttgtcaagctcatttcctggtatgacaacgaatttggctacagcaacagggtggtggacctcatggcccacatggcctccaaggagtaagacccctggaccaccagccccagcaagagcacaagaggaagagagagaccctcactgctggggagtccctgccacactcagtcccccaccacactgaatctcccctcctcacagttgccatgtagaccccttgaagaggggaggggcctagggagccgcaccttgtcatgtaccatcaataaagtaccctgtgctcaaccaaaaaaaaaaaaaa

SEQ ID NO: 312 - DNA, 1029 bp, Homo sapiens
  CDS (139)..(804)
tacgaggccgggtggcggggagcgcgacggtgcggggcgcgcgggcgacgggccagcgggatgggagcagggtcccccggcggcccgcagcctcgggagccgcgctgaagccgggggcgggaccagcgcggagccgacatgtgtctgcgcctcggaggcctgagtgtgggcgacttccggaaggtgctgatgaagacaggcctggtgctggtggtgctgggccatgtgagcttcatcacagctgccctgttccatggcacagtgctgcgctacgtgggcacccctcaagatgcggtggctctgcagtactgcgtggtcaacatcctctctgtcacttccgccatcgtggtcatcacttcaggcatcgcagccatcgtgttgtcacgctacctccctagcacccccctgcgctggacagtgtttagctcgagcgtggcctgtgctctcctttctctgacctgtgccctcggcctcttggcctccatcgccatgacctttgccacccagggcaaggcactgctggctgcctgcacttttgggagctctgaactactggccctcgcacctgactgtcccttcgaccccacacgcatttatagctccagcctgtgcctctggggcatcgccctagtgctctgcgtggcggagaacgtgtttgctgtacgctgtgctcagctcacccaccagctgctggagctgaggccctggtgggggaaaagcagccaccacatgatgcgggagaacccagagctggtggagggccgtgacctgctgagctgcaccagctctgagcctctgaccctctgagagatgatgtcctgcccaggcccgatggccactaggaccctgcaagcaactctgctctgtgaccaggccaggattcctggagctggcctgagagggctcaatggaccctcggggacccaagtggggctttcaaccctctcccccaccacccagcccactgcactgaaatgagactttattctgaaattattaaaaagaacagagatgctcaaaaaaaaaaaa

SEQ ID NO: 313 - DNA, 930 bp, Homo sapiens
  CDS (139)..(705)
tacgaggccgggtggcggggagcgcgacggtgcggggcgcgcgggcgacgggccagcgggatgggagcagggtcccccggcggcccgcagcctcgggagccgcgctgaagccgggggcgggaccagcgcggagccgacatgtgtctgcgcctcggaggcctgagtgtgggcgacttccggaaggtgctgatgaagacaggcctggtgctggtggtgctgggccatgtgagcttcatcacagctgccctgttccatggcacagtgctgcgctacgtgggcacccctcaagatgcggtggctctgcagtactgcgtggtcaacatcctctctgtcacttccgccatcgtggtcatcacttcaggcatcgcagccatcgtgttgtcacgctacctccctagcacccccctgggcaaggcactgctggctgcctgcacttttgggagctctgaactactggccctcgcacctgactgtcccttcgaccccacacgcatttatagctccagcctgtgcctctggggcatcgccctagtgctctgcgtggcggagaacgtgtttgctgtacgctgtgctcagctcacccaccagctgctggagctgaggccctggtgggggaaaagcagccaccacatgatgcgggagaacccagagctggtggagggccgtgacctgctgagctgcaccagctctgagcctctgaccctctgagagatgatgtcctgcccaggcccgatggccactaggaccctgcaagcaactctgctctgtgaccaggccaggattcctggagctggcctgagagggctcaatggaccctcggggacccaagtggggctttcaaccctctcccccaccacccagcccactgcactgaaatgagactttattctgaaattattaaaaagaacagagatgctcaaaaaaaaaaaa

SEQ ID NO: 314 - DNA, 1572 bp, Homo sapiens
  CDS (333)..(1301)
tgtgcaggactcatcggttacgggacacgagcgcaggaccagcgggcatggggcgtaccgggggtcttttgtttatggcccacccctggaaagccgaggggagggggacgagtccctgaggatctgtgggtgtgagccagccgcgtggccctgggcaacggcgctgccggacagaagtggcggttgctgacgcctggaaattcccctgaaggtggagcaccacccaacccccctgggtcccaccctccctcaaggcctcctccacctccacctccaccccgcctggcctggcgtccacctctgcggctcctacctgggtgcaatcgagttaaatggctgataagcagatcagcctgccagccaagctcatcaatggcggcatcgccgggctgatcggtgtcacctgcgtgtttcccatcgacctggccaagaccaggctgcagaaccagcagaacggccagcgcgtgtacacgagcatgtccgactgcctcatcaagaccgtccgctccgagggctacttcggcatgtaccggggagctgctgtgaacttgaccctcgtcacccccgagaaggccatcaagctggcagccaacgacttcttccgacatcagctctctaaggacgggcagaagctgaccctgcttaaagagatgctggcgggctgtggggctggcacctgccaggtgatcgtgaccacgcccatggagatgctgaagatccagctgcaggatgcagggcgcattgccgcccagaggaagatcctggctgcccagggccagctctcggcccaggggggtgcccagccctcagtggaggctccagctgcccctcggcccacggccacccagctgacccgcgacctgctgcggagccgtggcattgccggtctctacaagggactcggggccacgctgctcagggatgtccccttctctgtggtgtacttcccgctctttgccaacctgaaccagctgggccgcccggcgtccgaggagaagtcgcctttctacgtgtccttcctggccggctgtgtggctgggagtgccgccgctgtggccgtcaacccctgtgatgtggtgaagacgcggctccagtcacttcagcgaggcgtcaacgaggacacctactctgggatcctggactgtgccaggaagatcctgcggcacgagggcccctcggccttcctgaagggcgcctactgccgcgcgctggtcatcgcgccccttttcggcatcgcacaggtggtctacttcctgggcatcgcggagtccctgctggggctgctgcaggacccccaggcctgagcccagcacccgctccaccccagccagctgggcagggccggtgtggggctggagccaggcagctagcccaggacggagcaagggaagacccctccccagccctcccgtcggcaggggcagcagggggcagggtgcagggtccacataggtggtgcacacgcaagccccccggggtgctgcctgcaccgttgggatcaatgtctcatttatgtagaaaatgcagaaatctttacattcctcaagctagcccctgccccaatcctgccct

SEQ ID NO: 315 - DNA, 2024 bp, Homo sapiens
  CDS (19)..(1419)
gtactacagcagaagggtatgcggaagcgagcaccccagtctgagatggctcctgccggtgtgagcctgagggccaccatcctctgcctcctggcctgggctggcctggctgcaggtgaccgggtgtacatacaccccttccacctcgtcatccacaatgagagtacctgtgagcagctggcaaaggccaatgccgggaagcccaaagaccccaccttcatacctgctccaattcaggccaagacatcccctgtggatgaaaaggccctacaggaccagctggtgctagtcgctgccttcttgggcttccgtatatatggcatgcacagtgagctatggggcgtggtccatggggccaccgtcctctccccaacggctgtctttggcaccctggcctctctctatctgggagccttggaccacacagctgacaggctacaggcaatcctgggtgttccttggaaggacaagaactgcacctcccggctggatgcgcacaaggtcctgtctgccctgcaggctgtacagggcctgctagtggcccagggcagggctgatagccaggcccagctgctgctgtccacggtggtgggcgtgttcacagccccaggcctgcacctgaagcagccgtttgtgcagggcctggctctctatacccctgtggtcctcccacgctctctggacttcacagaactggatgttgctgctgagaagattgacaggttcatgcaggctgtgacaggatggaagactggctgctccctgatgggagccagtgtggacagcaccctggctttcaacacctacgtccacttccaagggaagatgaagggcttctccctgctggccgagccccaggagttctgggtggacaacagcacctcagtgtctgttcccatgctctctggcatgggcaccttccagcactggagtgacatccaggacaacttctcggtgactcaagtgcccttcactgagagcgcctgcctgctgctgatccagcctcactatgcctctgacctggacaaggtggagggtctcactttccagcaaaactccctcaactggatgaagaaactgtctccccggaccatccacctgaccatgccccaactggtgctgcaaggatcttatgacctgcaggacctgctcgcccaggctgagctgcccgccattctgcacaccgagctgaacctgcaaaaattgagcaatgaccgcatcagggtgggggaggtgctgaacagcattttttttgagcttgaagcggatgagagagagcccacagagtctacccaacagcttaacaagcctgaggtcttggaggtgaccctgaaccgcccattcctgtttgctgtgtatgatcaaagcgccactgccctgcacttcctgggccgcgtggccaacccgctgagcacagcatgaggccagggccccagaacacagtgcctggcaaggcctctgcccctggcctttgaggcaaaggccagcagcagataacaaccccggacaaatcagcgatgtgtcacccccagtctcccaccttttcttctaatgagtcgactttgagctggaaagcagccgtttctccttggtctaagtgtgctgcatggagtgagcagtagaagcctgcagcggcacaaatgcacctcccagtttgctgggtttattttagagaatgggggtggggaggcaagaaccagtgtttagcgcgggactactgttccaaaaagaattccaaccgaccagcttgtttgtgaaacaaaaaagtgttcccttttcaagttgagaacaaaaattgggttttaaaattaaagtatacatttttgcattgccttcggtttgtatttagtgtcttgaatgtaagaacatgacctccgtgtagtgtctgtaataccttagttttttccacagatgcttgtgatttttgaacaatacgtgaaagatgcaagcacctgaatttctgtttgaatgcggaacaatagctggttatttctcccttgtgttagtaataaacgtcttgccac

SEQ ID NO: 316 - DNA, 1495 bp, Homo sapiens
  CDS (54)..(710)
ccagcttggcacgagggtcacccacccggactcacattctcccagaggccgagatgcgggtcatggcgccccgagccctcctcctgctgctctcgggaggcctggccctgaccgagacctgggcctgctcccactccatgaggtatttcgacaccgccgtgtcccggcccggccgcggagagccccgcttcatctcagtgggctacgtggacgacacgcagttcgtgcggttcgacagcgacgccgcgagtccgagaggggagccgcgggcgccgtgggtggagcaggaggggccggagtattgggaccgggagacacagaactacaagcgccaggcacaggctgaccgagtgagcctgcggaacctgcgcggctactacaaccagagcgaggacgggtctcacaccctccagaggatgtatggctgcgacctggggcccgacgggcgcctcctccgcgggtatgaccagtccgcctacgacggcaaggattacatcgccctgaacgaggacctgcgctcctggaccgccgcggacaccgcggctcagatcacccagcgcaagttggaggcggcccgtgcggcggagcagctgagagcctacctggagggcacgtgcgtggagtggctccgcagatacctggagaacgggaaggagacgctgcagcgcggcagaacccccaaagacacacgtgagccagcagcccctctctgaccatgagggcaccctgaggtgctgggccctggggcttctaccctgcggagatcacactgaccttggcagcgggatggggaggaccagacccaggacaccgagcttgtggagaccaggccagcaggagatggaaccttccagaagtgggcagctgtggtggtgccttctggacaagagcagagatacacgtgccatatgcagcacgaggggctgcaagagcccctcaccctgagctgggagccatcttcccagcccaccatccccatcatgggcatcgttgctggcctggctgtcctggttgtcctagctgtccttggagctgtggtcaccgctatgatgtgtaggaggaagagctcaggtggtgtgtgggactgagatgcaggatttcttcacacctctcctttgtgacttcaagagcctctggcatctctttctgcaaaggcgtctgaatgtgtctgcgttcctgttagcataatgtgaggaggtggagagacagcccacccccgtgtccaccgtgacccctgtccccacactgacctgtgttccctccccgatcatctttcctgttccagagaggtggggctggatgtctccatctctgtctcaaattcatggtgcactgagctgcaacttcttacttccctaatgaagttaagaacctgaatataaatttgtgttctcaaatatttgctatgaagcgttgatggattaattaaataagtcaattcctagaagttgagagagcaaataaagacctgagaaccttccagaaaaaaaaaaaa

SEQ ID NO: 317 - DNA, 1559 bp, Homo sapiens
  CDS (43)..(681)
tcgcgatctagacccggactcagagtctcctcagacgccgagatgctggtcatggcgccccgaaccgtcctcctgctgctctcggcggccctggccctgaccgagacctgggccggctcccactccatgaggtatttcgacaccgccatgtcccggcccggccgcggggagccccgcttcatctcagtgggctacgtggacgacacgcagttcgtgaggttcgacagcgacgccgcgagtccgagagaggagccgcgggcgccgtggatagagcaggaggggccggagtattgggaccggaacacacagatcttcaagaccaacacacagactgaccgagagagcctgcggaacctgcgcggctactacaaccagagcgaggccgggtctcacaccctccagagcatgtacggctgcgacgtggggccggacgggcgcctcctccgcgggcataaccagtacgcctacgacggcaaggattacatcgccctgaacgaggacctgcgctcctggaccgcggcggacaccgcggctcagatcacccagcgcaagtgggaggcggcccgtgtggcggagcaggacagagcctacctggagggcacgtgcgtggagtggctccgccagatacctggagaacgggaaggacacgcctggagcgcgcggaccccccaaagacacacgtgacccaccaccccatctctgaccatgaggccaccctgaggtgctgggccctgggcttctaccctgcggagatcacactgacctggcagcgggatggcgaggaccaaactcaggacactgagcttgtggagaccagaccagcaggagatagaaccttccagaagtgggcagctgtggtggtgccttctggagaagagcagagatacacatgccatgtacagcatgaggggctgccgaagcccctcaccctgagatgggagccgtcttcccagtccaccgtccccatcgtgggcattgttgctggcctggctgtcctagcagttgtggtcatcggagctgtggtcgctgctgtgatgtgtaggaggaagagctcaggtggaaaaggagggagctactctcaggctgcgtgcagcgacagtgcccagggctctgatgtgtctctcacagcttgaaaagcctgagacagctgtcttgtgagggactgagatgcaggatttcttcacgcctcccctttgtgacttcaagagcctctgcgatctctttctgcaaaggcacctgaatgtgtctgcgtccctgttagcataatgtgaggaggtggagagacagcccacccttgtgtccactgtgacccctgttcccatgctgacctgtgtttcctccccagtcatctttcttgttccagagaggtggggctggatgtctccatctctgtctcaactttacgtgcactgagctgcaacttcttacttccctactgaaaataagaatctgaatataaatttgttttctcaaatatttgctatgagaggttgatggattaattaaataagtcaattcctggaatttgaaagagcaaataaagacctgagaccttccag

SEQ ID NO: 318 - DNA, 2225 bp, Homo sapiens
  CDS (1140)..(1769)
tcaggctttacaagcgatgagagactcatcagagccctgggcactgttgctggacgcagcctgagagcagctccctccttttccacctgagctcttcctcctacacatcacaacagccaccacagctcctaggacagctaggacaaccaggacagccaggccagcaacgatgcccacgatggggatggtgggctgggaagacggcttccatctcagggtgaggggctccggcagcccctcgtgctgcacatggcacgtgtatctctgctcttctccagaaggcaccaccacagctgcccacttctggaaggttccatctcctgctggcctggtctccacaagctcggtgtcctgagtttggtcctccccatcccactgccaggtcagtgtgatctccgcagggtagaagcccagggcccagcacctcagggtggcctcatggtcagagacgggatggtgggtcacgtgtgtctttgggtgttccgcgcgctgcagcgtctccttcccgttctccaggtatctgcggagccactccacgcacgtgccctccaggtaggctctccgctgctccgcctcacgggccgcctcccacttgcgctgggtgatctgagccgccgtgtccgcggcggtccaggagcgcagatcctcgttcagggcgatgtaatccttgccgtcgtaggcgaactggttatacccgcggaggaggcgcccgtccggccccaggtcgcagccaaacatcctctggagggtgtgagacccgtcctcgctctggttgtagtagccgcgcagtttccgcaggttcactcggtcagcctgtgcctggcgcttgtacttctgtgtctcccggtcccaatactccggcccctcctgctccacccacggcgcccggggctcccctctcggactcgcggcgtcgctgtcgaaccgcacgaactgcgtgtcgtccacgtagcccactgagatgaagcggggctctccgcggccgggccgggacacggcggtgtcgaaatacctcatggagtgggagcaggcccaggtctcggtcagggccaggcctcccgagagcagcaggaggagggctcggggcgccatgacccgcccacgcgtccgcggacgcgtgggcggacgcgtgggtggtcatggcgccccgaaccgtcctcctgctgctctcggcggccctggccctgaccgagacctgggccggctcccactccatgaggtatttctacacctccgtgtcccggcccggccgcggggagccccgcttcatctcagtgggctacgtggacgacacccagttcgtgaggttcgacagcgacgccgcgagtccgagagaggagccgcgggcgccgtggatagagcaggaggggccggagtattgggaccggaacacacagatctacaaggcccaggcacagactgaccgagagagcctgcggaacctgcgcggctactacaaccagagcgaggccgggtctcacaccctccagagcatgtacggctgcgacgtggggccggacgggcgcctcctccgcgggcatgaccagtacgcctacgacggcaaggattacatcgccctgaacgaggacctgcgctcctggaccgccgcggacacggcggctcagatcacccagcgcaagtgggaggcggcccgtgaggcggagcagccggagagcctacctggagggccgagtgcgtggagtggctccgcagatacctggagaacgggaaggacaagctggagcgcgctgaccccccaaagacacacgtgacccaccaccccatctctgaccatgaggccaccctgaggtgctgggccctgggtttctaccctgcggagatcacactgacctggcagcgggatggcgaggaccaaactcaggacactgagcttgtggagaccagaccagcaggagatagaaccttccagaagtgggcagctgtggtggtgccttctggagaagagcagagatacacatgccatgtacagcatgaggggctgccgaagcccctcaccctgagatgggagccgtcttcccagtccaccgtccccatcgtgggcattgttgctggcctggctgtcctagcagttgtggtcatcggagctgtggtcgctgctgtgatgtgtaggaggaagagttcaggtggaaaaggagggagctactctcaggctgcgtgcagcgacagtgcccagggctctgatgtgtctctcacagcttgaaaag

SEQ ID NO: 319 - DNA, 1085 bp, Homo sapiens
  CDS (16)..(657)
ggacgcgtgggcgagatgcgggtcacggcaccccgaaccgtcctcctgctgctctggggggcagtggccctgaccgagacctgggccggctcccactccatgaggtatttctacaccgccatgtcccggcccggccgcggggagccccgcttcatcgcagtgggctacgtggacgacacccagttcgtgaggttcgacagcgacgccgcgagtccgaggatggcgccccgggcgccatggatagagcaggaggggccggagtattgggacggggagacacggaacatgaaggcctccgcgcagacttaccgagagaacctgcggatcgcgctccgctactacaaccagagcgaggccgggtctcacatcatccaggtgatgtatggctgcgacgtggggccggacgggcgcctcctccgcgggcatgaccagtccgcctacgacggcaaggattacatcgccctgaacgaggacctgagctcctggaccgcggcggacacggcggctcagatcacccagcgcaagtgggaggcggcccgtgtggcggagcagctgagagccctacctggagggcctgtgccgtggagtggctccgcagatacctggagaacgggaaggagacgctgcagcgcgccgggaccccccaaaagacacatgtgacccaccaaacccatctctgaccatgaggccaccctgaggtgcctgggccctgggcttctaccctggggagatcacagctgcacctggcagcgggatggcgaggaccaaatcagggacacgagcttggggaacagaccagcaggcgtcgaactacaaagggacacaggagggggcccctcgagaaggcaaacaccattgcaggacacaggagggctcccaaggccctcacgtaggggaggacgattcaatagagagggccatggacaggggagcacagagatccaaacgggatcgtgcagggcacagacgaagagagaacacgaagagacgaccccgtgggaaaggcagagcactgctactgagcacgccgtcagacacacacacaacacgacgacgacgacgaggacatccctcgccgagcgtga

SEQ ID NO: 320 - DNA, 1100 bp, Homo sapiens
  CDS (1)..(1098)
atggccgtcatggcgccccgaaccctcgtcctgctactctcgggggccctggccctgacccagacctgggcgggctcccactccatgaggtatttctacacttccgtgtcccggcccggccgcggggagccccgcttcatcgccgtgggctacgtggacgacacgcagttcgtgcggttcgacagcgacgccgcgagccagaggatggagccgcgggcgccgtggatagagcaggaggggccggagtattgggaccggaacacacggaatgtgaaggcccagtcacagactgaccgagtggacctggggaccctgcgcggctactacaaccagagcgaggccggttctcacaccatccagatgatgtatggctgcgacgtggggtcggacgggcgcttcctccgcgggtaccggcaggacgcctacgacggcaaggattacatcgccctgaaagaggacctgcgctcttggaccgcggcggacatggcagctcagaccaccaagcacaagtgggaggcggcccatgtggcggagcagtggagagcctacctggccgggcacgtgcgctggagtggctccgcagatacctggagaacgggaaggagacgctgcagcgcacggacgccccccaaaacgcatatgactcaccacgctgtctctgaccatgaagccaccctgaggtgctgggccctgagcttctaccctgcggagatcacactgacctggcagcgggatggggaggaccagacccaggacacggagctcgtggagaccaggcctgcaggggatggaaccttccagaagtgggtggctgtggtggtgccttctggacaggagcagagatacacctgccatgtgcagcatgagggtttgcccaagcccctcaccctgagatgggagccgtcttcccagcccaccatccccatcgtgggcatcattgctggcctggttctctttggagctgtgatcactggagctgtggtcgctgctgtgatgtggaggaggaagagctcagatagaaaaggagggagctactctcaggctgcaagcagtgacagtgcccagggctctgatgtgtctctcacagcttgtaaagtgtg

SEQ ID NO: 321 - DNA, 1113 bp, Homo sapiens
  CDS (12)..(875)
tttcgtcgaggatggccgtcatggcgccccgaaccctcgtcctgctactctcgggggccctggccctgacccagacctgggcgggctcccactccatgaggtatttctacacctccgtgtcccggcccggccgcggggagccccgcttcatcgccgtgggctacgtggacgacacgcagttcgtgcggttcgacagcgacgccgcgagccagaggatggagccgcgggcgccgtggatagagcaggaggggccggagtattgggaccggaacacacggaatgtgaaggcccactcacagactgaccgagagagcctgcggatcgcgctccgctactacaaccagagcgaggacggttctcacaccatccagaggatgtatggctgcgacgtggggccggacgggcgcttcctccgcgggtaccagcaggacgcttacgacggcaaggattacatcgccctgaacgaggacctgcgctcttggaccgcggcggacatggcggctcagatcacccagcgcaagtgggagacggcccatgaggcggagcagtggagagcctacctggagggccggtgcgtggagttggctccgcaggatacctgggagaacgggaaggagacgctgcagcgcacggacgcccccaagacgcatatgactcaccacgctgtctctgaccatgaggccaccctgagggtgctgggccctgagcttctaccctgcggagatcacactgacctggcagcgggatggggaggaccagacccaggacacggagctcgtggagaccaggcctgcaggggatgggaccttccagaagtgggcgtctgtggtggtgccttctggacaggagcagagatacacctgccatgtgcagcatgagggtctgcccaagcccctcaccctgagatgggagccgtcttcccagcccaccatccccatcgtgggcatcattgctggcctggttctctttggagctgtgatcgctggagctgtggtcgctgctgtgatgtggaggaggaagagctcagatagaaaaggagggagctactctcaggctgcaagcagtgacagtgcccagggctctgatatgtctctcacagcttgtaaagtgtga

SEQ ID NO: 322 - DNA, 1221 bp, Homo sapiens
  CDS (1)..(213)
atgcgggtcacggcgccccgaaccctcctcctgctgctctggggggcagtggccctgaccgagacctgggctggtgagtgcggggtcggcagggaaatggcctctgtggggaggagcgaggggaccgcaggcgggggcgcaggacccggggagccgcgccgggaggagggtcgggcgggtctcagcccctccttgccccaggctcccactccatgaggtatttccacacctccgtgtcccggcccggccgcggggagccccgcttcatctcagtgggctacgtggacggcacccagttcgtgaggttcgacagcgacgccgcgagtccgaggacggagccccgggcgccgtggatagagcaagaggggccggagtattgggaccggaacacacagatctccaagaccaacacacagacttaccgagaggacctgcggaccctgctccgctactacaaccagagcgaggccgggtctcacaccatccagaggatgtctggctgcgacgtggggccggacgggcgcctcctccgcgggtataaccagttcgcctacgacggcaaggattacatcgccctgaacgaggacctgagctcctggaccgcggcggacaccgcggctcagatcacccagcgcaagtgggaggcggcccgtgtggcggagcaggacagagcctacctggagggcacgtgcgtggagtggctccgcagatacctggagaacgggaaggagacgctgcagcgcgcggaccccccaaagacacatgtgacccaccaccccatctctgaccatgaggccaccctgaggtgctgggccctgggcttctaccctgcggagatcacactgacctggcagcgggatggcgaggaccaaactcaggacaccgagcttgtggagaccagaccagcaggagatagaaccttccagaagtgggcagctgtggtggtgccttctggagaagagcagagatacacatgccatgtacagcatgaggggctgccgaagcccctcaccctgagatgggagccatcttcccagtccaccatccccatcgtgggcattgttgctggcctggctgtcctagcagttgtggtcatcggagctgtggtcgctactgtgatgtgtaggaggaagagctcaggtggaaaaggagggagctactctcaggctgcgtccagcgacagtgcccagggctctgatgtgtctctcacagcttgaaaag

SEQ ID NO: 323 - DNA, 1546 bp, Homo sapiens
  CDS (30)..(686)
ccggactcggattctccccagacgccgagatgcgggtcatggcgccccgaaccctcatcctgctgctctcgggagccctggccctgaccgagacctgggcctgctcccactccatgaggtatttcgacaccgccgtgtcccggcccggccgcggagagccccgcttcatctcagtgggctacgtggacgacacgcagttcgtgcggttcgacagcgacgccgcgagtccgagaggggagccccgggcgccgtgggtggagcaggaggggccggagtattgggaccgggagacacagaagtacaagcgccaggcacaggctgaccgagtgaacctgcggaaactgcgcggctactacaaccagagcgaggacgggtctcacaccctccagtggatgtatggctgcgacctggggcccgacgggcgcctcctccgcgggtatgaccagtccgcctacgacggcaaggattacatcgccctgaacgaggacctgcgctcctggaccgccgcggacacggcggctcagatcacccagcgcaagtgggaggcggcccgtgaggcggagcagtggagagcctacctggagggcacgtgcgtggagtggctccgcagatacctggagaacgggaaggagacgctgcagcgcgcgggaacacccaaagacacacgtgacccaccatcccgtctctgaccatgagggccaccctgaggtgctggggccctgggcttctaccctgcggagatcacactgacctggcagcgggatggcgaggaccaaactcaggacaccgagcttgtggagaccaggccagcaggagatggaaccttccagaagtgggcagctgtggtggtgccttctggagaagagcagagatacacgtgccatgtgcagcacgaggggctgccagagcccctcaccctgagatgggagccatcttcccagcccaccatccccatcgtgggcatcgttgctggcctggctgtcctggctgtcctagctgtcctaggagctgtgatggctgttgtgatgtgtaggaggaagagctcaggtggaaaaggagggagctgctctcaggctgcgtccagcaacagtgcccagggctctgatgagtctctcatcgcttgtaaagcctgagacagctgcctgtgtgggactgagatgcaggatttcttcacacctctcctttgtgacttcaagagcctctggcatctctttctgcaaaggcatctgaatgtgtctgcgttcctgttagcataatgtgaggaggtggagagacagcccacccccgtgtccaccgtgacccctgtccccacactgacctgtgttccctccccgatcatctttcctgttccagagaagtgggctggatgtctccatctctgtctcaactttacgtgtactgagctgcaacttcttacttccctactgaaaataagaatctgaatataaatttgttttctcaaatatttgctatgagaggttgatggattaattaaataagtcaattcctggaagttgagagagcaaataaagacctgagaaccttc

SEQ ID NO: 324 - DNA, 1491 bp, Homo sapiens
  CDS (60)..(698)
gcgctcttctaaagtccgcacgcacccaccgggactcagattctccccagaccccgaggatggccgtcatggcgccccgaaccctcctcctgctactctcgggggccctggccctgacccagacctgggcgggctcccactccatgaggtatttctacacctccgtgtcccggcccggccgcggggagccccgcttcatcgccgtgggctacgtggacgacacgcagttcgtgcggttcgacagcgacgccgcgagccagaggatggagccgcgggcgccgtggatagagcaggaggggccggagtattgggaccaggagacacggaatgtgaaggcccagtcacagactgaccgagtggacctggggaccctgcgcggctactacaaccagagcgaggacggttctcacaccatccagataatgtatggctgcgacgtggggccggacgggcgcttcctccgcgggtaccggcaggacgcctacgacggcaaggattacatcgccctgaacgaggacctgcgctcttggacccgcggcggacatggcagctcagatcaccaagcgcaagtgggaggcggcccatgcggcggagcaggcagagagcctacctggagggccggtgcgtggagtggctccgcagatacctggagaacgggaaggagacgctgcagcgcacggacccccccaagacacatatgacccaccaccccatctctgaccatgaggccaccctgaggtgcctgggccctgggcttctaccctgcggagatcacactgacctggcagcgggatggggaggaccagacccaggacacggagctcgtggagaccaggcctgcaggggatggaaccttccagaagtgggcggctgtggtggtgccttctggagaggagcagagatacacctgccatgtgcagcatgagggtctgcccaagcccctcaccctgagatgggagctgtcttcccagcccaccatccccatcgtgggcatcattgctggcctggttctccttggagctgtgatcactggagctgtggtcgctgccgtgatgtggaggaggaagagctcaggtggagaaggggtgaaagatagaaaaggagggagttacactcaggctgcaagcagtgacagtgcccagggctctgatgtgtctctcacagcttgtaaagtgtgagacagctgccttgtgtgggactgagaggcaagagttgttcctgcccttccctttgtgacttgaagaaccctgactttgtttctgcaaaggcacctgcatgtgtctgtgttcgtgtaggcataatgtgaggaggtggggagaccaccccaccccgatgtccaccatgaccctcttcccacgctgacctgtgctccctctccaatcatctttcctgttccagagaggtggggctgaggtgtctccatctctgtctcaacttcatggtgcactgagctgtaacttcttccttccctattaaaattagaacctgagt

SEQ ID NO: 325 - DNA, 1310 bp, Homo sapiens
  CDS (21)..(677)
cggacgcgtgggcgccgaggatggccgtcatggcgccccgaaccctcctcctgctactctcgggggccctggccctgacccagacctgggcgggctcccactccatgaggtatttcttcacatccgtgtcccggcccggccgcggggagccccgcttcatcgccgtgggctacgtggacgacacgcagttcgtgcggttcgacagcgacgccgcgagccagaagatggagccgcgggcgccgtggatagagcaggaggggccggagtattgggaccaggagacacggaatatgaaggcccactcacagactgaccgagcgaacctggggaccctgcgcggctactacaaccagagcgaggacggttctcacaccatccagataatgtatggctgcgacgtggggccggacgggcgcttcctccgcgggtaccggcaggacgcctacgacggcaaggattacatcgccctgaacgaggacctgcgctcttggaccgcggcggacatggcagctcagatcaccaagcgcaagtgggaggcggtccatgcggcggagcagcggagagtctacctggagggccggtgcgtggacgggctccgcagatacctggagaacgggaaggagacgctgcagcgcacggacccccccaaagacacatatgacccaacaccccatctctgaccatgaggccaccctgaggtgctggggccctgggcttctaccctgcgggagatcacactgacctggcagcggggatggggaggaccagacccaggacacggagctcgtggagaccaggccctgcaggggactggaaccttccagaagtgggcggctgtggtggtgccttctggagaggagcagagatacacctgccatgtgcagcatgagggtctgcccaagcccctcaccctgagatgggagctgtcttcccagcccaccatccccatcgtgggcatcattgctggcctggttctccttggagctgtgatcactggagctgtggtcgctgccgtgatgtggaggaggaagagctcagatagaaaaggagggagttacactcaggctgcaagcagtgacagtgcccagggctctgatgtgtctctcacagcttgtaaaggatgtgatgcatgtattgaatcaaagacgtctctaaggcactgttttcagaaggaagaatacgcgggtccaaaaaccaagaagtcaaagcagctgtcttcccagcccaccatccccatcatgggcatcgttactgtcctggttgttcttggtgctgttttcaccagagctgtggtcactgctgtgatgtga

SEQ ID NO: 326 - DNA, 2026 bp, Homo sapiens
  CDS (179)..(1882)
tttcgtgcctccagagcctccgggtctgggcggcgcttcggctcctcccgagccgcctgctagccccgcgccgcactccatccccacaggctggggacgggcccggtgcggctgtgtgggttcgggagcggagttgcagaatccaaggacccattttgttctttctccgcactgctttatgggaggcattatggcccccaaagacataatgacaaatactcatgctaaatccatcctcaattcaatgaactccctcaggaagagcaataccctctgtgatgtgacattgagagtagagcagaaagacttccctgcccatcggattgtgctggctgcctgtagtgattacttctgtgccatgttcactagtgagctctcagagaaggggaaaccttatgttgacatccaaggtttgactgcctctaccatggaaattttattggactttgtgtacacagaaacagtacatgtgacagtggagaatgtacaagaactgcttcctgcagcctgtctgcttcagttgaaaggtgtgaaacaagcctgctgtgagttcttagaaagtcagttggacccttctaattgcctgggtattagggattttgctgaaacccacaattgtgttgacctgatgcaagcagctgaggtttttagccagaagcattttcctgaagtggtacagcatgaagagttcattcttctgagtcaaggagaggtggaaaagctaatcaagtgcgacgaaattcaggtggattctgaagagccagtctttgaggctgtcatcaactgggtgaagcatgccaagaaagagcgggaagaatccttgcctaacctgctacagtatgtgcggatgcccctactaacccccaggtatatcacagatgtaatagatgctgagcctttcatccgctgtagtttacaatgcagggatctggttgatgaagcaaagaagtttcatctgaggcctgaacttcggagtcagatgcagggacccaggacaagggctcgcctaggagccaatgaagtgcttttggtggttgggggctttggaagccagcagtctcccattgatgtggtagagaaatatgaccccaagactcaggagtggagctttttgccaagcatcactcgtaagagacgttatgtggcctcagtgtcccttcatgaccggatctacgtcattggtggctatgatggccgttcccgccttagttcagtggaatgtctagactacacagcagatgaggatggggtctggtattctgtggcccctatgaatgtccgacgaggtcttgctggagccaccaccctgggagatatgatctatgtctctggaggctttgatggaagcaggcgtcacaccagtatggagcgctatgatccaaacattgaccagtggagcatgctgggagatatgcagacagcccgggaaggtgccggactcgtagtggccagtggagtgatctactgtctaggaggatatgacggcttgaatatcttaaattcagttgagaaatacgaccctcatacaggacattggactaatgttacaccaatggccaccaagcgttctggtgcaggagtagccctgctgaatgaccatatttatgtggtggggggatttgatggtacagcccacctttcttccgttgaagcatacaacattcgcactgattcctggacaactgtcaccagtatgaccactccacgatgctatgtaggggccacagtgcttcgggggagactctatgcaattgcaggatatgatggtaattccctgctaagtagcattgaatgttatgaccctatcatcgacagctgggaagtcgtgacatccatgggaacccagcgctgtgatgctggtgtttgtgttctccgcgagaagtgaccattgttggagcaccatccagagctagtgaccagtccagtggacagttagtgggagaatcaaaaatcctttccagaatgtctgtttctcactacgtgcaccgggtgattacaggcaccagtgcagtgaaaaaaaaaaaaa

SEQ ID NO: 327 - DNA, 1686 bp, Homo sapiens
  CDS (355)..(1683)
gttctttcatttaccaaagtgacatgcacctactaggtgccaggtgtttagacgtacatacaaccctctgcaaaatctttcagtgtagtcctctgtatgaaaagtttccagccaagaattgccactgcacctgagataagggggatcctggccattaaggaaaccttgccttcgaaactgagccgtgaggaactatacaaaatgggaaattgggacaaatcccagtggctcatgacactaagaagtaaaattacgaactcactgagctggaagtcattcaacgggaattgaataggtaactgcacttttgtgagattataaatataccacggagggtaacgaagctacagaagaatggaagaagacagcctggaagactcaaaccttcctccaaaagtttggcattctgagatgacggtgtcagtgacaggcgaaccacctagtaccgtagaagaagaaggaatacctaaagaaacagacatagaaatcatcccagaaatcccggaaactctagagccactgtcccttccagatgtgctgaggatctcggcagttctggaggacaccacagaccagctctctattctgaactacatcatgcccgttcagtacgaagggagacagagcatctgcgtgaaaagcagagaaatgaatctagaaggaacgaatctagacaaacttccaatggcctcaacaatcacaaaaatacccagtccgttaataactgaggaaggacccaacttgccagaaatcagacacagaggccggttcgctgtggagtttaacaaaatgcaggatcttgtcttcaaaaaacctacaaggcagaccatcatgactacggagacactgaagaaaattcagattgataggcagtttttcagcgatgtgattgcagataccattaaggagttgcaagattcggccacttacaacagtctcctgcaagctttgagcaaagagagggaaaacaaaatgcatttctatgacatcattgccagggaggaaaaaggaagaaaacagataatatcacttcaaaaacagctaattaatgtcaaaaaggaatggcaatttgaagtccagagtcagaatgagtatattgctaacctcaaggaccaactgcaagagatgaaggcaaaatccaacttggagaatcgctacatgaaaaccaataccgagctgcagattgcccagacccagaaaaagtgtaacagaacagaggaactcttggtggaagattttgagaaactcaggatgaaaaccgaagaagaggcccggactcatacagagattgaaatgttccttagaaaggagcagcagaaacttgaggagaggctggagttctggatggagaaatacgataaggacacagaaatgaaacagaatgaactaaatgctctcaaagccacaaaggccagtgacttagcacaccttcaagacctggcaaagatgataagagagtatgaacaggtcatcattgaagatcgtatagaaaaggagaggagcaagaagaaggtaaaacaggatctcttggaattaaagagcgttataaagctccaggcctggtggcgaggcactatgatacggagagaaattggtggtttcaagatgcctaaagacaaagttgatagcaaggattcaaaaggcaaaggtaaaggcaaggataagaggagaggcaagaagaagtga

SEQ ID NO: 328 - DNA, 2199 bp, Homo sapiens
  CDS (95)..(1768)
ccggccgcccgggtcgacgatttcgtagcgcccccgccccggccccgagagcacgccggcccagtcccccacctggggcgcccgtctgcccaccatgaggaagatccgcgccaatgccatcgccatcctgaccgtagcctggatcctgggcactttctactacttatggcaggacaaccgagcccacgcagcatcctccggcggccggggcgcgcagagggcaggcaggaggtcggagcagctccgcgaggaccgcaccatcccgctcattgtgacaggaactccctcgaaaggctttgatgagaaggcctacctgtcggccaagcagctgaaggctggagaggacccctacagacagcacgccttcaaccagctggagagtgacaagctgagcccagaccggcccatccgggacacccgccattacagctgcccatctgtgtcctactcctcggacctgccagccaccagcgtcatcatcaccttccacaatgaggcccgttccaccctgctgcgcacagtgaagagtgtcctgaaccgaactcctgccaacttgatccaggagatcattttagtggatgacttcagctcagatccggaagactgtctactcctgaccaggatccccaaggtcaagtgcctgcgcaatgatcggcgggaagggctgatccggtcccgagtgcgtggggcggacgtggctgcagctaccgttctcacctttctggatagccactgcgaagtgaacaccgagtggctgccgcccatgctgcagcgggtgaaggaggaccacacccgcgtggtgagtcccatcattgatgtcatcagtctggataattttgcctaccttgcagcatctgctgaccttcgtggagggttcgactggagcctgcatttcaagtgggagcagatccctcttgagcagaagatgacccggacagaccccaccaggcccataaggacgcctgtcatagctggaggaatcttcgtgatcgacaagtcctggtttaaccacttgggaaagtatgatgcccagatggacatctgggggggagagaattttgagctctccttcagggtgtggatgtgtggtggcagtctggagatcgtcccctgcagccgggtgggccatgtcttcaggaaacggcacccctacaacttccctgagggtaatgccctcacctacatcaggaatactaagcgcactgcagaagtgtggatggatgaatacaagcaatactactatgaggcccggccctcggccatcgggaaggccttcggcagtgtggctacgcggatagagcagaggaagaagatgaactgcaagtccttccgctggtacctggagaacgtctacccagagctcacggtccccgtgaaggaagcactccccggcatcattaagcagggggtgaactgcttagaatctcagggccagaacacagctggtgacttcctgcttggaatggggatctgcagagggtctgccaagaacccgcagcccgcccaggcatggctgttcagtgaccacctcatccagcagcaggggaagtgcctggctgccacctccaccttaatgtcctcccctggatccccagtcatactgcagatgtgcaaccctagagaaggcaagcagaaatggaggagaaaaggatctttcatccagcattcagtcagtggcctctgcctggagacaaagcctgcccagctggtgaccagcaagtgtcaggctgacgcccaggcccagcagtggcagctgttgccacacacatgacggagggattttcttgaagggtcagctattgcactgtgctgggaggctggctgtggctcctgtttgtgaagagaactcccagttccttttcacagccgctgagaacacatccacacatctaccccacggccttgtcttggaactgctcctgctatccccacaccctgcttcctcaccccactggctcttgggcaaatgactgttggtaccaggaccctgggggtctcccctacaaagcagaccagcctgggggcagatatacctaccacaggagcccctgtctttcataggggcaaggatccacatacccatagagttcagggttttagaaggtttgggatttttttgaatttgttctaaaatatcgcaggtgtgtggaaaatgcttttttcggggggaaaagtcagggttttttaagggggctgttc

SEQ ID NO: 329 - DNA, 784 bp, Homo sapiens
  CDS (501)..(728)
gtacccctgtatccggggaggggtattcattgttggtgaaatatgtcgaggaccagatgctttttggtctcccaaagacctatcaaactgcagatcttttggctttgtaatatattcagttccacatttattcattcaagatttttgtgtcctcattatgtgccaagtactgggttggacactaggtgacagagatgaacaaatccctaatcttgggatttcacagtggatgttggaatttagtaccgtttagcttcattaggttctgcagtagtcccaagattttccaagatcatcctgtcctccagtgttctattgattcaacttcagaatatatcccagactctgtccctctttactcctcactgctgttgccctgggtccatctgccatcatctctcacctggattatctcagtagtttcccaactggtttccttgtttccattcttgcctccttctgtctactctcaatataacagctagaacaatccttttacaatggaattcagatcatgtttacccctctgttcaaattctccagtgactttccagtttttacatgatctggctcctactacctgtctcactgtgtttcctactactctcctgctctttctcctcttaataaacactgggctcatggtgtttcctttaacatgccaggcatgcttgaccctgtcctgtctcagggccctgctgttccctctgcctggaacattcttcccatagtgtctgcatggctcgctctctcactgctttggattgctgctcagaagtcacct

SEQ ID NO: 330 - DNA, 542 bp, Homo sapiens
  CDS (61)..(216)
gctcttttcgctgatttttaaatttactttgctactttgatgattaattggcaatgatcaatgcacaaccttttactctcatgtgttattttcaattttccccttgtgtttattgtagcaagaactccctaccttccttccttattatctatttgtaatttggaagccccagtataccttagaattgatccaggatggcctcatttatgtatggcttgagagttttttaacagaaaaaacattgattctctaaaaaataagagtttttatcatagtttctcaatattttcctatctacaaggacaaaattttttttcagaagcaaaacaactagcatactaactttctgtttatgcatgtagtaaatattggatgattactgcacaatttccaggaattatgcagagataactacagagatgagtagaataaaactcattttagagcttcaaactctagtcagagatgtagttacaaacaaataatccagtgtagttagttaggtactctggcagaagtgtaatgaaagtagtatgaaaaaa

SEQ ID NO: 331 - DNA, 357 bp, Homo sapiens
  CDS (151)..(264)
gggctcggcgtgggccttggtctgtaaaggggcgtctacgcggcagcagccgtgatcatgggggccctgggctaggcaacagcactagttgtcgcgcgtcaccaaacactgtgaagcacctctctagcggagacctgctccaggatcaacatgctgtggggcacagaaattaatgggttagctaacgctttcattgaccaaaggaaactcatccgagatgatgtcatgactcagctggccctatatgagctgaaaaatctcacttagtatagctagctgttgggtggttttccatggacacttccacaggcagaagccctagactaagcttcttagacagacaaagtgattagcccg

SEQ ID NO: 332 - DNA, 1046 bp, Homo sapiens
  CDS (4)..(888)
gttatgctgctgaaggaatcttgtggaaatgtttttttctctgcagtgagaataaggaggagcaggaaacacagcataattagcatcatcattattctggctggagcaattgcactcatcattggctttggtatttcagggagacactccatcacagtcactactgtcgcctcagctgggaacattggggaggatggaatcctgagctgcacttttgaacctgacatcaaactttctgatatcgtgatacaatggctgaaggaaggtgttttaggcttggtccatgagttcaaagaaggcaaagatgagctgtcggagcaggatgaaatgttcagaggccggacagcagtgtttgctgatcaagtgatagttggcaatgcctctttgcggctgaaaaacgtgcaactcacagatgctggcacctacaaatgttatatcatcacttctaaaggcaaggggaatgctaaccttgagtataaaactggagccttcagcatgccggaagtgaatgtggactataatgccagctcagagaccttgcggtgtgaggctccccgatggttcccccagcccacagtggtctgggcatcccaagttgaccagggagccaacttctcggaagtctccaataccagctttgagctgaactctgagaatgtgaccatgaaggttgtgtctgtgctctacaatgttacgatcaacaacacatactcctgtatgattgaaaatgacattgccaaagcaacaggggatatcaaagtgacagaatcggagatcaaaaggcggagtcacctacagctgctaaactcaaaggcttctctgtgtgtctcttctttctttgccatcagctgggcacttctgcctctcagcccttacctgatgctaaaataatgtgccttggccacaaaaaaagcatgcaaagtcattgttacaacagggatctacagaactatttcaccaccagatatgacctagttttatatttctgggaggaaatgaattcatatctagaagtctggagtgagcaaacaagagcaaaaaaaaaa

SEQ ID NO: 333 - DNA, 1280 bp, Homo sapiens
  CDS (189)..(1196)
  misc_feature (1)...(1280): n = a,t,c or g
acgtggcggcggagccctgggtcggtgtctgcgcgctggtgtctgaggcccaggctgaggcctccgctattgctggagcgcaggcggcggagaggatgactgccgctgccattctctcttgagctagcgagccgccgccaccctccaccctcccccggcagggcggagaggagcggccggagtcagcgatggtgcccggcgaggagaaccaactggtcccgaaagaggcaccactggatcataccagtgacaagtcacttctcgacgctaattttgagccaggaaagaagaactttctgcatttgacagataaagatggtgaacaacctcaaatactgctggaggattccagtgctggggaagacagtgttcatgacaggtttataggtccgcttccaagagaaggttctgtgggttctaccagtgattatgtcagccaaagctactcctactcatctattttgaataaatcagaaactggatatgtgggactagtaaaccaagcaatgacttgctatttgaatagccttttgcaaacactttttatgactcctgaatttaggaatgcattatataagtgggaatttgaagaatctgaagaagatccagtgacaagtattccataccaacttcaaaggctttttgttttgttacaaaccagcaaaaagagagcaattgaaaccacagatgttacaaggagctttggatgggatagtagtgaggcttggcagcagcatgatgtacaagaactatgcagagtcatgtttgatgctttggaacagaaatggaagcaaacagaacaggctgatcttataaatgagctatatcaaggcaagctgaaggactacgtgagaagtctggaatgtggttatgagggctggcgaatcgacacatatcttgatattccattggtcatccgaccttatgggtccagccaagcatttgctagtgtggaagaagcatggcgtgcatttattcagccagagattctggatggcccgattcagtatttttgtgaccgttgtaagaagaagtgtgatgcacggaagggccttcggtgtgcgcattttccttatctgctgaccttacagctgaaaagattcgattttgagtatgcaaccatgcataggattaaactgaatgatcgtatgacgtgtcccgaggaactatatatgaaagcccccccgatgggaagatgagagctctcaacaatataaagctgcttgacagtatagcatgtatgcgccgcgtctagttncctaacctacgtgcgcgtccgc

SEQ ID NO: 334 - DNA, 814 bp, Homo sapiens
  CDS (403)..(669)
tttcttagggataagctgggaaatttttacaggtgtggaggatatttcaaatacatcttttgcctttgcactaacatgctttcatttctttcagactcttcctccattccctttaaagtcttccccatcatatcactgatctcaaaagctagatttgtcttcattatagtcgtatccctaaaaccatgcattggtctggacaggagttgtcccatattcccttgcagactggtcactccatgttctctgttacagaaaggaccagccaagcttcagctgtcccattcctccccctacaacacacacacctttcaggcagggaggagatgagcttccagccccaagagtggaggctgccacatcctaacatagtatctattgaaaaggaagcagtgtgtatctatgattatatctctgttcatctatatatttttgacatgtagcaacacctctccatcttatcaaggaactcaactcggtctgggtctccccagtgcccagtggtggcctttgacaggtaggaggatgcagtgctgcaggctattttgttttttgttacaaaactgtcttttcccttttcccctccacctgattcagcatgatccctgtgagctggttctcacaatctcctgggactgggctgaggcaggggcttcgctctattctccctaaccatactgtcttcctttcccccttgccacttagcagttatccccccagctatgccttctccctccctcccttgccctggcatatattgtgccttatttatgctgcaaatataacattaaactatcaagtgaaaaaaaaaaaa

SEQ ID NO: 335 - DNA, 500 bp, Homo sapiens
  CDS (90)..(401)
gcccacgcgtccgggggaggcggggtaagtttggtgggaaactctgtaatttccttttttactttcacagcaatagtgcagaatccagaatggatgtcctctttgtagccatctttgctgtgccacttatcctggatgactttagtgcagatttcaccattgattactccatatttgagtcagaggacaggctgaacaggttggataaggacataacagaagcaatagagactaccattagtcttgaaacagcacgtgcagaccatccgaagcctgtaactgtgaaaccagtaacaacggaacctcagagtccagatctgaacgatgccgtgtccagtttgcgaagtcctattcccctcctcctgtcgtgtgcctttgttcaggtggggatgtatttcatgtagaaggtggaagaaggctgctatgactctttggatgggagtctggcaagaggaaattggaagataaaataaataataagtgaaataaaaaaaaaaaaa

SEQ ID NO: 336 - DNA, 800 bp, Homo sapiens
  CDS (258)..(416)
attagacttaccctctatctaattccaagattccattactttctcccctttgcttaaaagcatttttaaatgtacaatgccgtatatggctatcatagaccaaaatatgacgtatacctgtgtggagagacacaacgactatcatacctttgtggtgtgggccaacgatgaggaccacctgctgctcatatcgctgcagaatgggggcatcctgacggagatcggagcactctctctagattcatgactatgagtgcatgcgcaaccatcaacagggctacatcctcacctgcccatccaacctgggcaccgggctgcgggcaggtgtgcatatcaagctgcccaacctgggcaagcatacagctcccacacccctttcagcgcgctatcgcttgtttaactggcgactacggtattgagctctgcccttgtcctgcctctggtgagggtgagccagtcaagaaggtgagggttagtaccgccctaccagatctggaggattactccccgtgtgcactacctccagagtatgtaccacagatttttcccatgggggtgtcttccagtcaaggggacatcccataagtagttttgagagggtggatgggttccttgcccaccagaaccagccctagtcccggctccttgcgttcctgtggcccctccgttcccccttagaataggcctgaaagggctggaaagggccagtattgggggtgtgagctagctttacccccgcaggacatacacaggagcctttgatctcattaaagatatgtgccccagctaaaaaaaaaaaa

SEQ ID NO: 337 - DNA, 1475 bp, Homo sapiens
  CDS (532)..(1386)
cctctcttaacagactccagaaattgagcatttgttggttcattgtaaggtctcaattctccatcatctaaactgaaaccattgctccacagtttaagcaaaatctgaaccacttttggacctggccggaccacggagtgcccattgaccccaggggtgtgctggacttcctggaggaggtgcaccataagcaggaacgcatcatgcatgcaaggccagtcgtggtgcacggcagtgctggaattggccggacagggacatacgttgtgattgatattctgactgacatcaacagagagaaaggtgttgactgcaacattgacgttctcaaaacgttgaggtggtgtccgtgggctcttgaagactgtggctttaggtctattagacttggaagatttgcacttcacttcatcttcatacaattctgccaaggccaacttgcgcgtcttcgcccctcctgcggttgccaggcaaccggccccggaagttgcggcaggtgcgtccgcagcgggcgccgctagccagcggaagatggcggagggcggaggccctgagcccggcgagcaggagaggaggtcttccgggccgcggcctccgagcgcgcgggatttgcagttggccttggcagaattgtatgaagatgaagtgaagtgcaaatcttccaagtctaatagacctaaagccacagtcttcaagagcccacggacaccacctcaacggttttactcaagtgaacatgaatacagtggattaaatatagttcgaccttcaactgggaaaattgtgaatgaacttttcaaagaggcaagggaacatggggctgtccctctgaatgaagccacaagagcttcaggtgatgataaatctaagtcatttacaggtggaggatacagattgggtagttctttttgtaagcggtctgaatatatctatggagaaaatcagctgcaagatgttcagattttgcttaaactgtggagcaatggtttcagtttagatgatggagaattgagaccttacaatgaaccaacaaatgctcaatttctggagtctgttaagagaggccttacacctgaaatagtcagtacaccttcctctccagaagaggaggataaatcaatacttaatgcagttgttcttattgatgattcagtgccaacaacaaaaattcaaatcaggttagcagatgggagtcgtttgatacaaagattcaatagtacacacaggatcctggatgtccggaactttattgtacagtctcgtcctgaatttgcggctcttgactttattcttgtgacttcatttccgaataaagagctaacagatgaaagcctgacactgctagaagcagatattcttaacactgtgttactccagcaactaaaataatattgttcctgtccatgcagtagcatgtgggaatagatgatgtgccgtattaataaggacaatacttcagcattaaaaacagccaa

SEQ ID NO: 338 - DNA, 1613 bp, Homo sapiens
  CDS (532)..(1524)
cctctcttaacagactccagaaattgagcatttgttggttcattgtaaggtctcaattctccatcatctaaactgaaaccattgctccacagtttaagcaaaatctgaaccacttttggacctggccggaccacggagtgcccattgaccccaggggtgtgctggacttcctggaggaggtgcaccataagcaggaacgcatcatgcatgcaaggccagtcgtggtgcacggcagtgctggaattggccggacagggacatacgttgtgattgatattctgactgacatcaacagagagaaaggtgttgactgcaacattgacgttctcaaaacgttgaggtggtgtccgtgggctcttgaagactgtggctttaggtctattagacttggaagatttgcacttcacttcatcttcatacaattctgccaaggccaacttgcgcgtcttcgcccctcctgcggttgccaggcaaccggccccggaagttgcggcaggtgcgtccgcagcgggcgccgctagccagcggaagatggcggagggcggaggccctgagcccggcgagcaggagaggaggtcttccgggccgcggcctccgagcgcgcgggatttgcagttggccttggcagaattgtatgaagatgaagtgaagtgcaaatcttccaagtctaatagacctaaagccacagtcttcaagagcccacggacaccacctcaacggttttactcaagtgaacatgaatacagtggattaaatatagttcgaccttcaactgggaaaattgtgaatgaacttttcaaagaggcaagggaacatggggctgtccctctgaatgaagccacaagagcttcaggtgatgataaatctaagtcatttacaggtggaggatacagattgggtagttctttttgtaagcggtctgaatatatctatggagaaaatcagctgcaagatgttcagattttgcttaaactgtggagcaatggtttcagtttagatgatggagaattgagaccttacaatgaaccaacaaatgctcaatttctggagtctgttaagagaggagagattcccctggagcttcagcgccttgttcatggtggccaagtgaatttggatatggaggatcatcaggatcaagaatacataaaacctagattgaggttcaaggcttttagtggagaagggcaaaaacttggaagccttacacctgaaatagtcagtacaccttcctctccagaagaggaggataaatcaatacttaatgcagttgttcttattgatgattcagtgccaacaacaaaaattcaaatcaggttagcagatgggagtcgtttgatacaaagattcaatagtacacacaggatcctggatgtccggaactttattgtacagtctcgtcctgaatttgcggctcttgactttattcttgtgacttcatttccgaataaagagctaacagatgaaagcctgacactgctagaagcagatattcttaacactgtgttactccagcaactaaaataatattgttcctgtccatgcagtagcatgtgggaatagatgatgtgccgtattaataaggacaatacttcagcattaaaaacagccaa

SEQ ID NO: 339 - DNA, 1924 bp, Homo sapiens
  CDS (120)..(503)
tttcgtgcttccccctcgctgtctccctcggcctgtgccgccgccgacgccgcttgtgggcccgactccgctctgtctgcttcgccaccttctccccgagcactgcccggccggccgccatggctaacgtggctgacacgaagctgtacgacatcctgggcgtcccgcccggcgccagcgagaacgagctgaagaaggcatacagaaagttagccaaggaatatcatcctgataagaatccaaatgcaggagacaaatttaaagaaataagttttgcatatgaagtactatcaaatcctgagaagcgtgagttatatgacagatacggagagcaaggtcttcgggaaggcagcggcggaggtggtggcatggatgatattttctctcacatttttggtgggggattgttcggcttcatgggcaatcagagtagaagtcgaaatggcagaagaagaggagaggacatgatgcatccactcaaagtatctttagcaagatctgtataatggcaagacaaccaaactagcaacttagcaagaatgtgctctgtagtgcatgcagtggccaaggcggaaagtctggagctgtccaaaagtgtagtgcttgtcgaggtcgaggtgtggcgcatcatgatcagcacagctgggctccagggcatggtacaacagatgcagtctgtgtgctctgattgtaatggacgaaggagaggtaattaatgaaaaagaccgctgtaaaaaatgtgaagggaagaaggtgattaaagaagtcaagattcttgaagtccacgtagacaaaggcatgaaacatggacagagaattacattcactggggaagcagaccaggcccaggagtggaacccggagacattgttcttttgctacaggagaaagaacatgaggtatttcagagagatgggaatgatttgcacatgacatataaaataggacttgttgaagctctatgtggatttcagttcacatttaagcaccttgatggacgtcagattgtggtgaaatacccccctggcaaagtaattgaaccagggtgtgttcgtgtagttcgaggtgaagggatgccgcagtatcgtaatccctttgaaaaaggtgatctttacataaagtttgatgtgcagtttcctgaaaacaactggatcaacccagacaagctttctgaactagaagatcttctgccatctagaccggaagttcctaacataattggagaaacagaggaggtagagcttcaggaatttgatagcactcgaggctcaggaggtggtcagaggcgtgaagcctataatgatagctctgatgaagaaagcagcagccatcatggacctggagtgcagtgtgcccatcagtaaactctgcaaacaaattgcacaggtggattttctttccacatttgcctgatttgttctcagcaatccagctggagtgtcttatcaatcccagatgaactgagggacatctgttggtctatgtataacttttaaaattggtatagtatctacagagtgtataatttaaactaaccacaaagctttacatcttcattttgactgttccatagcaaaataaagcacttgaaaggaaacaaaactccctttcacacatggattattataagtttcaatcctggtatctgtgcttgatttttatcagttttgtgtaaatttttatgtttcatattttaaatttaaatcccacattgtaaagtttgtacaatttgtcctgaagctttgtgtttggctgcacctgcataagctgctacaaataaaataaaaaatttcatagcctgtatctatcatttaaatgcatggaaaaaaatgggctttgcacacaatgggtttggagctgactgggaacaatggaaaaaattacattagctgtggttgtaaagtttttttgtttttgggttttg

SEQ ID NO: 340 - DNA, 2304 bp, Homo sapiens
  CDS (61)..(1974)
aaggatccttaattaaataatcccccccccccgggcggcgccctgggcggccgcggagtcatggacggcagtggacccttcagctgccccatctgcctagagccactccgggagccggtgacgctgccctgcggccacaacttctgtctcgcctgcctgggcgcgctctggccgcatcgtggcgcgagtggagccggcggacccggaggcgcggcccgctgcccgctgtgccaggagcccttccccgacggccttcagctccgcaagaaccacacgctgtccgagctgctgcagctccgccagggctcgggccccgggtccggccccggcccggcccctgccctggccccggagccctcggcacccagcgcgctgcccagtgtcccggagccgtcggccccctgcgctcccgagccgtggcccgcgggcgaagagccagtgcgctgcgacgcgtgccccgagggcgcggccctgcccgccgcgctgtcctgcctctcctgcctcgcctccttttgccccgcgcacctgggcccgcacgagcgcagccccgccctccgcggacaccgcctggtgccgccgctgcgccggctagaggagagcctgtgcccgcgccacctacggccgctcgagcgctactgccgcgcggagcgcgtgtgtctgtgcgaggcctgcgccgcacaggagcaccgcggccacgagctggtgccgctggagcaggagcgcgcgcttcaggaggctgagcagtccaaagtcctgagcgccgtggaggaccgcatggacgagctgggtgctggcattgcacagtccaggcgcacagtggccctcatcaagagtgcagccgtagcagagcgggagagggtgagccggctgtttgcagatgctgcggccgccctgcagggcttccagacccaggtgctgggcttcatcgaggagggggaagctgccatgctaggccgctcccagggtgacctgcggcgacaggaggaacagcgcagccgcctgagccgagcccgccagaatctcagccaggtccctgaagctgactcagtcagcttcctgcaggagctgctggcactaaggctggccctggaggatgggtgtggccctgggcctggacccccgagggagctcagcttcaccaaatcatcccaagctgtccgtgcagtgagagacatgctggccgtggcctgcgtcaaccagtgggagcagctgagggggccgggtggcaacgaggatgggccacagaagctggactcggaagctgatgctgagccccaagacctcgagagtacgaacctcttggagagtgaagctcccagggactatttcctcaagtttgcctatattgtggatttggacagcgacacagcagacaagttcctgcagctgtttggaaccaaaggtgtcaagagggtgctgtgtcctatcaactaccccttgtcgcccacccgcttcacccattgtgagcaggtgctgggcgagggtgccctggaccgaggcacctactactgggaggtggagattatcgagggctgggtcagcatgggggtcatggccgaagacttctccccacaagagccctacgaccgcggccggctgggccgcaacgcccactcctgctgcctgcagtggaatggacgcagcttctccgtctggtttcatgggctggaggctcccctgccccaccccttctcgcccacggttggggtctgcctggaatacgctgaccgtgccttggccttctatgctgtacgggacggcaagatgagcctcctgcggaggctgaaggcctcccggccccgccggggtggcatcccggcctcccccattgaccccttccagagccgcctggacagtcactttgcggggctcttcacccacagactcaagcctgccttcttcctggagagtgtggacgcccacttgcagatcgggcccctcaagaagtcctgcatatccgtgctgaagaggaggtgatgccgggcacgggcgctcctgctgccgtctctgctccaggaagctgcctcctctgggccctctccttcgtctgggaaggcaccagcatgagtcccacacacccagccttctcatttctagaggcttccacctttttatacactcagccttccctctcccaggcaggaggacccccagaccctgttcccctgcagacctcacttctgggagacagagctacagctgggacagctccaagctaccctaacccctcctttcccaggtttctagaatagtgtctggcatgtagtagatgctcaataaacacttgttgaatgaaaaaaaaaa

SEQ ID NO: 341 - DNA, 13941 bp, Homo sapiens
  CDS (1547)..(13120)
gcactgcagcgccagcgtccgagcgggcggccgagctcccggagcggcctggccccgagccccgagcgggcgtcgctcagcagcaggtcgcggccgcgcagccccatccagccccgcgcccgccatgccgtccgcgggccccgcctgagctgcggtctccgcgcgcgggcgggcctggggacggcggggccatgcgcgcgctgccctaacgatgccgcccgccgcgcccgcccgcctggcgctggccctgggcctgggcctgtggctcggggcgctggcggggggccccgggcgcggctgcgggccctgcgagcccccctgcctctgcggcccagcgcccggcgccgcctgccgcgtcaactgctcgggccgcgggctgcggacgctcggtcccgcgctgcgcatccccgcggacgccacagcgctagacgtctcccacaacctgctccgggcgctggacgttgggctcctggcgaacctctcggcgctggcagagctggatataagcaacaacaagatttctacgttagaagaaggaatatttgctaatttatttaatttaagtgaaataaacctgagtgggaacccgtttgagtgtgactgtggcctggcgtggctgccgcgatgggcggaggagcagcaggtgcgggtggtgcagcccgaggcagccacgtgtgctgggcctggctccctggctggccagcctctgcttggcatccccttgctggacagtggctgtggtgaggagtatgtcgcctgcctccctgacaacagctcaggcaccgtggcagcagtgtccttttcagctgcccacgaaggcctgcttcagccagaggcctgcagcgccttctgcttctccaccggccagggcctcgcagccctctcggagcagggctggtgcctgtgtggggcggcccagccctccagtgcctcctttgcctgcctgtccctctgctccggccccccgccacctcctgcccccacctgtaggggccccaccctcctccagcacgtcttccctgcctccccaggggccaccctggtggggccccacggacctctggcctctggccagctagcagccttccacatcgctgccccgctccctgtcactgccacacgctgggacttcggagacggctccgccgaggtggatgccgctgggccggctgcctcgcatcgctatgtgctgcctgggcgctatcacgtgacggccgtgctggccctgggggccggctcagccctgctggggacagacgtgcaggtggaagcggcacctgccgccctggagctcgtgtgcccgtcctcggtgcagagtgacgagagccttgacctcagcatccagaaccgcggtggttcaggcctggaggccgcctacagcatcgtggccctgggcgaggagccggcccgagcggtgcacccgctctgcccctcggacacggagatcttccctggcaacgggcactgctaccgcctggtggtggagaaggcggcctggctgcaggcgcaggagcagtgtcaggcctgggccggggccgccctggcaatggtggacagtcccgccgtgcagcgcttcctggtctcccgggtcaccaggagcctagacgtgtggatcggcttctcgactgtgcagggggtggaggtgggcccagcgccgcagggcgaggccttcagcctggagagctgccagaactggctgcccggggagccacacccagccacagccgagcactgcgtccggctcgggcccaccgggtggtgtaacaccgacctgtgctcagcgccgcacagctacgtctgcgagctgcagcccggaggcccagtgcaggatgccgagaacctcctcgtgggagcgcccagtggggacctgcagggacccctgacgcctctggcacagcaggacggcctctcagccccgcacgagcccgtggaggtcatggtattcccgggcctgcgtctgagccgtgaagccttcctcaccacggccgaatttgggacccaggagctccggcggcccgcccagctgcggctgcaggtgtaccggctcctcagcacagcagggaccccggagaacggcagcgagcctgagagcaggtccccggacaacaggacccagctggcccccgcgtgcatgccagggggacgctggtgccctggagccaacatctgcttgccgctggacgcctcttgccacccccaggcctgcgccaatggctgcacgtcagggccagggctacccggggccccctatgcgctatggagagagttcctcttctccgttgccgcggggccccccgcgcagtactcggtcaccctccacggccaggatgtcctcatgctccctggtgacctcgttggcttgcagcacgacgctggccctggcgccctcctgcactgctcgccggctcccggccaccctggtccccaggccccgtacctctccgccaacgcctcgtcatggctgccccacttgccagcccagctggagggcacttgggcctgccctgcctgtgccctgcggctgcttgcagccacggaacagctcaccgtgctgctgggcttgaggcccaaccctggactgcggatgcctgggcgctatgaggtccgggcagaggtgggcaatggcgtgtccaggcacaacctctcctgcagctttgacgtggtctccccagtggctgggctgcgggtcatctaccctgccccccgcgacggccgcctctacgtgcccaccaacggctcagccttggtgctccaggtggactctggtgccaacgccacggccacggctcgctggcctgggggcagtgtcagcgcccgctttgagaatgtctgccctgccctggtggccaccttcgtgcccggctgcccctgggagaccaacgataccctgttctcagtggtagcactgccgtggctcagtgagggggagcacgtggtggacgtggtggtggaaaacagcgccagccgggccaacctcagcctgcgggtgacggcggaggagcccatctgtggcctccgcgccacgcccagccccgaggcccgtgtactgcagggagtcctagtgaggtacagccccgtggtggaggccggctcggacatggtcttccggtggaccatcaacgacaagcagtccctgaccttccagaacgtggtcttcaatgtcatttatcagagcgcggcggtcttcaagctctcactgacggcctccaaccacgtgagcaacgtcaccgtgaactacaacgtaaccgtggagcggatgaacaggatgcagggtctgcaggtctccacagtgccggccgtgctgtcccccaatgccacgctagcactgacggcgggcgtgctggtggactcggccgtggaggtggccttcctgtggaactttggggatggggagcaggccctccaccagttccagcctccgtacaacgagtccttcccggttccagacccctcggtggcccaggtgctggtggagcacaatgtcatgcacacctacgctgccccaggtgagtacctcctgaccgtgctggcatctaatgccttcgagaacctgacgcagcaggtgcctgtgagcgtgcgcgcctccctgccctccgtggctgtgggtgtgagtgacggcgtcctggtggccggccggcccgtcaccttctacccgcacccgctgccctcgcctgggggtgttctttacacgtgggacttcggggacggctcccctgtcctgacccagagccagccggctgccaaccacacctatgcctcgaggggcacctaccacgtgcgcctggaggtcaacaacacggtgagcggtgcggcggcccaggcggatgtgcgcgtctttgaggagctccgcggactcagcgtggacatgagcctggccgtggagcagggcgcccccgtggtggtcagcgccgcggtgcagacgggcgacaacatcacgtggaccttcgacatgggggacggcaccgtgctgtcgggcccggaggcaacagtggagcatgtgtacctgcgggcacagaactgcacagtgaccgtgggtgcggccagccccgccggccacctggcccggagcctgcacgtgctggtcttcgtcctggaggtgctgcgcgttgaacccgccgcctgcatccccacgcagcctgacgcgcggctcacggcctacgtcaccgggaacccggcccactacctcttcgactggaccttcggggatggctcctccaacacgaccgtgcgggggtgcccgacggtgacacacaacttcacgcggagcggcacgttccccctggcgctggtgctgtccagccgcgtgaacagggcgcattacttcaccagcatctgcgtggagccagaggtgggcaacgtcaccctgcagccagagaggcagtttgtgcagctcggggacgaggcctggctggtggcatgtgcctggcccccgttcccctaccgctacacctgggactttggcaccgaggaagccgcccccacccgtgccaggggccctgaggtgacgttcatctaccgagacccaggctcctatcttgtgacagtcaccgcgtccaacaacatctctgctgccaatgactcagccctggtggaggtgcaggagcccgtgctggtcaccagcatcaaggtcaatggctcccttgggctggagctgcagcagccgtacctgttctctgctgtgggccgtgggcgccccgccagctacctgtgggatctgggggacggtgggtggctcgagggtccggaggtcacccacgcttacaacagcacaggtgacttcaccgttagggtggccggctggaatgaggtgagccgcagcgaggcctggctcaatgtgacggtgaagcggcgcgtgcgggggctcgtcgtcaatgcaagccgcacggtggtgcccctgaatgggagcgtgagcttcagcacgtcgctggaggccggcagtgatgtgcgctattcctgggtgctctgtgaccgctgcacgcccatccctgggggtcctaccatctcttacaccttccgctccgtgggcaccttcaatatcatcgtcacggctgagaacgaggtgggctccgcccaggacagcatcttcgtctatgtcctgcagctcatagaggggctgcaggtggtgggcggtggccgctacttccccaccaaccacacggtacagctgcaggccgtggttagggatggcaccaacgtctcctacagctggactgcctggagggacaggggcccggccctggccggcagcggcaaaggcttctcgctcaccgtgctcgaggccggcacctaccatgtgcagctgcgggccaccaacatgctgggcagcgcctgggccgactgcaccatggacttcgtggagcctgtggggtggctgatggtgaccgcctccccgaacccagctgccgtcaacacaagcgtcaccctcagtgccgagctggctggtggcagtggtgtcgtatacacttggtccttggaggaggggctgagctgggagacctccgagccatttaccacccatagcttccccacacccggcctgcacttggtcaccatgacggcagggaacccgctgggctcagccaacgccaccgtggaagtggatgtgcaggtgcctgtgagtggcctcagcatcagggccagcgagcccggaggcagcttcgtggcggccgggtcctctgtgcccttttgggggcagctggccacgggcaccaatgtgagctggtgctgggctgtgcccggcggcagcagcaagcgtggccctcatgtcaccatggtcttcccggatgctggcaccttctccatccggctcaatgcctccaacgcagtcagctgggtctcagccacgtacaacctcacggcggaggagcccatcgtgggcctggtgctgtgggccagcagcaaggtggtggcgcccgggcagctggtccattttcagatcctgctggctgccggctcagctgtcaccttccgcctgcaggtcggcggggccaaccccgaggtgctccccgggccccgtttctcccacagcttcccccgcgtcggagaccacgtggtgagcgtgcggggcaaaaaccacgtgagctgggcccaggcgcaggtgcgcatcgtggtgctggaggccgtgagtgggctgcagatgcccaactgctgcgagcctggcatcgccacgggcactgagaggaacttcacagcccgcgtgcagcgcggctctcgggtcgcctacgcctggtacttctcgctgcagaaggtccagggcgactcgctggtcatcctgtcgggccgcgacgtcacctacacgcccgtggccgcggggctgttggagatccaggtgcgcgccttcaacgccctgggcagtgagaaccgcacgctggtgctggaggttcaggacgccgtccagtatgtggccctgcagagcggcccctgcttcaccaaccgctcggcgcagtttgaggccgccaccagccccagcccccggcgtgtggcctaccactgggactttggggatgggtcgccagggcaggacacagatgagcccagggccgagcactcctacctgaggcctggggactaccgcgtgcaggtgaacgcctccaacctggtgagcttcttcgtggcgcaggccacggtgaccgtccaggtgctggcctgccgggagccggaggtggacgtggtcctgcccctgcaggtgctgatgcggcgatcacagcgcaactacttggaggcccacgttgacctgcgcgactgcgtcacctaccagactgagtaccgctgggaggtgtatcgcaccgccagctgccagcggccggggcgcccagcgcgtgtggccctgcccggcgtggacgtgagccggcctcggctggtgctgccgcggctggcgctgcctgtggggcactactgctttgtgtttgtcgtgtcatttggggacacgccactgacacagagcatccaggccaatgtgacggtggcccccgagcgcctggtgcccatcattgagggtggctcataccgcgtgtggtcagacacacgggacctggtgctggatgggagcgagtcctacgaccccaacctggaggacggcgaccagacgccgctcagtttccactgggcctgtgtggcttcgacacagagggaggctggcgggtgtgcgctgaactttgggccccgcgggagcagcacggtcaccattccacgggagcggctggcggctggcgtggagtacaccttcagcctgaccgtgtggaaggccggccgcaaggaggaggccaccaaccagacggtgctgatccggagtggccgggtgcccattgtgtccttggagtgtgtgtcctgcaaggcacaggccgtgtacgaagtgagccgcagctcctacgtgtacttggagggccgctgcctcaattgcagcagcggctccaagcgagggcggtgggctgcacgtacgttcagcaacaagacgctggtgctggatgagaccaccacatccacgggcagtgcaggcatgcgactggtgctgcggcggggcgtgctgcgggacggcgagggatacaccttcacgctcacggtgctgggccgctctggcgaggaggagggctgcgcctccatccgcctgtcccccaaccgcccgccgctggggggctcttgccgcctcttcccactgggcgctgtgcacgccctcaccaccaaggtgcacttcgaatgcacgggctggcatgacgcggaggatgctggcgccccgctggtgtacgccctgctgctgcggcgctgtcgccagggccactgcgaggagttctgtgtctacaagggcagcctctccagctacggagccgtgctgcccccgggtttcaggccacacttcgaggtgggcctggccgtggtggtgcaggaccagctgggagccgctgtggtcgccctcaacaggtctttggccatcaccctcccagagcccaacggcagcgcaacggggctcacagtctggctgcacgggctcaccgctagtgtgctcccagggctgctgcggcaggccgatccccagcacgtcatcgagtactcgttggccctggtcaccgtgctgaacgagtacgagcgggccctggacgtggcggcagagcccaagcacgagcggcagcaccgagcccagatacgcaagaacatcacggagactctggtgtccctgagggtccacactgtggatgacatccagcagatcgctgctgcgctggcccagtgcatggggcccagcagggagctcgtatgccgctcgtgcctgaagcagacgctgcacaagctggaggccatgatgctcatcctgcaggcagagaccaccgcgggcaccgtgacgcccaccgccatcggagacagcatcctcaacatcacaggagacctcatccacctggccagctcggacgtgcgggcaccacagccctcagagctgggagccgagtcaccatctcggatggtggcgtcccaggcctacaacctgacctctgccctcatgcgcatcctcatgcgctcccgcgtgctcaacgaggagcccctgacgctggcgggcgaggagatcgtggcccagggcaagcgctcggacccgcggagcctgctgtgctatggcggcgccccagggcctggctgccacttctccatccccgaggctttcagcggggccctggccaacctcagtgacgtggtgcagctcatctttctggtggactccaatccctttccctttggctatatcagcaactacaccgtctccaccaaggtggcctcgatggcattccagacacaggccggcgcccagatccccatcgagcggctggcctcagagcgcgccatcaccgtgaaggtgcccaacaactcggactgggctgcccggggccaccgcagctccgccaactccgccaactccgttgtggtccagccccaggcctccgtcggtgctgtggtcaccctggacagcagcaaccctgcggccgggctgcatctgcagctcaactatacgctgctggacggccactacctgtctgaggaacctgagccctacctggcagtctacctacactcggagccccggcccaatgagcacaactgctcggctagcaggaggatccgcccagagtcactccagggtgctgaccaccggccctacaccttcttcatttccccggggagcagagacccagcggggagttaccatctgaacctctccagccacttccgctggtcggcgctgcaggtgtccgtgggcctgtacacgtccctgtgccagtacttcagcgaggaggacatggtgtggcggacagaggggctgctgcccctggaggagacctcgccccgccaggccgtctgcctcacccgccacctcaccgccttcggcgccagcctcttcgtgcccccaagccatgtccgctttgtgtttcctgagccgacagcggatgtaaactacatcgtcatgctgacatgtgctgtgtgcctggtgacctacatggtcatggccgccatcctgcacaagctggaccagttggatgccagccggggccgcgccatccctttctgtgggcagcggggccgcttcaagtacgagatcctcgtcaagacaggctggggccggggctcaggtaccacggcccacgtgggcatcatgctgtatggggtggacagccggagcggccaccggcacctggacggcgacagagccttccaccgcaacagcctggacatcttccggatcgccaccccgcacagcctgggtagcgtgtggaagatccgagtgtggcacgacaacaaagggctcagccctgcctggttcctgcagcacgtcatcgtcagggacctgcagacggcacgcagcgccttcttcctggtcaatgactggctttcggtggagacggaggccaacgggggcctggtggagaaggaggtgctggccgcgagcgacgcagcccttttgcgcttccggcgcctgctggtggctgagctgcagcgtggcttctttgacaagcacatctggctctccatatgggaccggccgcctcgtagccgtttcactcgcatccagagggccacctgctgcgttctcctcatctgcctcttcctgggcgccaacgccgtgtggtacggggctgttggcgactctgcctacagcacggggcatgtgtccaggctgagcccgctgagcgtcgacacagtcgctgttggcctggtgtccagcgtggttgtctatcccgtctacctggccatcctttttctcttccggatgtcccggagcaaggtggctgggagcccgagccccacacctgccgggcagcaggtgctggacatcgacagctgcctggactcgtccgtgctggacagctccttcctcacgttctcaggcctccacgctgagcaggcctttgttggacagatgaagagtgacttgtttctggatgattctaagagtctggtgtgctggccctccggcgagggaacgctcagttggccggacctgctcagtgacccgtccattgtgggtagcaatctgcggcagctggcacggggccaggcgggccatgggctgggcccagaggaggacggcttctccctggccagcccctactcgcctgccaaatccttctcagcatcagatgaagacctgatccagcaggtccttgccgagggggtcagcagcccagcccctacccaagacacccacatggaaacggacctgctcagcagcctgtccagcactcctggggagaagacagagacgctggcgctgcagaggctgggggagctggggccacccagcccaggcctgaactgggaacagccccaggcagcgaggctgtccaggacaggactggtggagggtctgcggaagcgcctgctgccggcctggtgtgcctccctggcccacgggctcagcctgctcctggtggctgtggctgtggctgtctcagggtgggtgggtgcgagcttccccccgggcgtgagtgttgcgtggctcctgtccagcagcgccagcttcctggcctcattcctcggctgggagccactgaaggtcttgctggaagccctgtacttctcactggtggccaagcggctgcacccggatgaagatgacaccctggtagagagcccggctgtgacgcctgtgagcgcacgtgtgccccgcgtacggccaccccacggctttgcactcttcctggccaaggaagaagcccgcaaggtcaagaggctacatggcatgctgcggagcctcctggtgtacatgctttttctgctggtgaccctgctggccagctatggggatgcctcatgccatgggcacgcctaccgtctgcaaagcgccatcaagcaggagctgcacagccgggccttcctggccatcacgcggtctgaggagctctggccatggatggcccacgtgctgctgccctacgtccacgggaaccagtccagcccagagctggggcccccacggctgcggcaggtgcggctgcaggaagcactctacccagaccctcccggccccagggtccacacgtgctcggccgcaggaggcttcagcaccagcgattacgacgttggctgggagagtcctcacaatggctcggggacgtgggcctattcagcgccggatctgctgggggcatggtcctggggctcctgtgccgtgtatgacagcgggggctacgtgcaggagctgggcctgagcctggaggagagccgcgaccggctgcgcttcctgcagctgcacaactggctggacaacaggagccgcgctgtgttcctggagctcacgcgctacagcccggccgtggggctgcacgccgccgtcacgctgcgcctcgagttcccggcggccggccgcgccctggccgccctcagcgtccgcccctttgcgctgcgccgcctcagcgcgggcctctcgctgcctctgctcacctcggtgtgcctgctgctgttcgccgtgcacttcgccgtggccgaggcccgtacttggcacagggaagggcgctggcgcgtgctgcggctcggagcctgggcgcggtggctgctggtggcgctgacggcggccacggcactggtacgcctcgcccagctgggtgccgctgaccgccagtggacccgtttcgtgcgcggccgcccgcgccgcttcactagcttcgaccaggtggcgcagctgagctccgcagcccgtggcctggcggcctcgctgctcttcctgcttttggtcaaggctgcccagcagctacgcttcgtgcgccagtggtccgtctttggcaagacattatgccgagctctgccagagctcctgggggtcaccttgggcctggtggtgctcggggtagcctacgcccagctggccatcctgctcgtgtcttcctgtgtggactccctctggagcgtggcccaggccctgttggtgctgtgccctgggactgggctctctaccctgtgtcctgccgagtcctggcacctgtcacccctgctgtgtgtggggctctgggcactgcggctgtggggcgccctacggctgggggctgttattctccgctggcgctaccacgccttgcgtggagagctgtaccggccggcctgggagccccaggactacgagatggtggagttgttcctgcgcaggctgcgcctctggatgggcctcagcaaggtcaaggagttccgccacaaagtccgctttgaagggatggagccgctgccctctcgctcctccaggggctccaaggtatccccggatgtgcccccacccagcgctggctccgatgcctcgcacccctccacctcctccagccagctggatgggctgagcgtgagcctgggccggctggggacaaggtgtgagcctgagccctcccgcctccaagccgtgttcgaggccctgctcacccagtttgaccgactcaaccaggccacagaggacgtctaccagctggagcagcagctgcacagcctgcaaggccgcaggagcagccgggcgcccgccggatcttcccgtggcccatccccgggcctgcggccagcactgcccagccgccttgcccgggccagtcggggtgtggacctggccactggccccagcaggacaccccttcgggccaagaacaaggtccaccccagcagcacttagtcctccttcctggcgggggtgggccgtggagtcggagtggacaccgctcagtattactttctgccgctgtcaaggccgagggccaggcagaatggctgcacgtaggttccccagagagcaggcaggggcatctgtctgtctgtgggcttcagcactttaaagaggctgtgtggccaaccaggacccagggtcccctccccagctcccttgggaaggacacagcagtattggacggtttctagcctctgagatgctaatttatttccccgagtcctcaggtacagcgggctgtgcccggccccaccccctgggcagatgtcccccactgctaaggctgctggcttcagggagggttagcctgcaccgccgccaccctgcccctaagttattacctctccagttcctaccgtactccctgcaccgtctcactgtgtgtctcgtgtcagtaatttatatggtgttaaaatgtgtatatttttgtatgtcactattttcactagggctgaggggcctgcgcccagagctggcctcccccaacacctgctgcgcttggtaggtgtggtggcgttatggcagcccggctgctgcttggatgcgagcttggccttgggccggtgctgggggcacagctgtctgccaggcactctcatcaccccagaggccttgtcatcctcccttgccccaggccaggtagcaagagagcagcgcccaggcctgctggcatcaggtctgggcaagtagcaggactaggcatgtcagaggaccccagggtggttagaggaaaagactcctcctgggggctggctcccagggtggag

SEQ ID NO: 342 - DNA, 1795 bp, Homo sapiens
  CDS (26)..(1222)
  misc_feature (1)...(1795): n = a,t,c or g
tggggtcactcgagaccctgagggtatggaggaatcacaagacatagaagagctgggacctctgaattactatgtggaggaaatcacatatctatcacaaacaactactttggactctctatacgctggattcgtagaagtacctgaggaatcacctaagcaaccctctgaagtcaatgttaacccactctatgtctctcctgcatgtaaaaaaccactaatccacatgtatgaaaaggagttcacttctgagatctgctgtggttctttgtggggagtcaatttgctgttgggaacccgatctaatctatatctgatggacagaagtggaaaggctgacattactaaacttataaggcgaagaccattccgccagattcaagtcttagagccactcaatttgctgattaccatctcaggtcataagaacagacttcgggtgtatcatctgacctggttgaggaacaagattttgaataatgatccagaaagtaaaagaaggcaagaagaaatgctgaagacagaggaagcctgcaaagctattgataagttaacaggctgtgaacacttcagtgtcctccaacatgaagaaacaacatatattgcaattgctttgaaatcatcaattcacctttatgcatgggcaccaaagtcctttgatgaaagcactgctattaaagtatttccaacacttgatcataagccagtgacagttgacctggctattggttctgaaaaaagactaaagattttcttcagctcagcagatggatatcacctcatcgatgcagaatctgaggttatgtctgatgtgaccctgccaaagaatcccctggaaatcattataccacagaatatcatcattttacctgattgcttgggaattggcatgatgctcaccttcaatgctgaagccctctctgtggaagcaaatgaacaactcttcaagaagatccttgaaatgtggaaagacataccatcttctatagcttttgaatgtacacagcgaaccacaggatggggccaaaaggccattgaagtgcgctctttgcaatccagggttctggaaagtgagctgaagcgcaggtcaattaagaagctgagattcctgtgcacccggggtgacaagctgttctttacctctaccctgcgcaatcaccacagccgggtttacttcatgacacttggaaaacttgaagagctccaaagcaattatgatgtctaaaagtttccagtgatttattaccacattataaacatcatgtataggcagtctgcatcttcagatttcagagattaaatgagtattcagttttatttttagtaaagattaaatccaaaactttacttttaatgtagcacagaatagttttaatgagaaatgcagctttatgtataaaattaactatagcaagctctaggtactccaatggtgtacaatgtcttttgcacaaactttgtaacttttgttactgtgaatccaaacattactctttggacagtttggacagtatctgtattcagattttacaacatggagtaaagaaacctgttatgaattagattacaagcagccttcaaaagaattggcactgggataagatttttcagaaaaagnaaaacatcggcaaactgtgtgtgatttttccaaagctatataaagaaccaaaggtttagtcaagnaacaaaaatcttaaagnttattataacccagactaaggttgaacaacctgcatgnccagagaaaactatggcgacaaaggggaaaaggncaccacttcgtttttcttcactg

SEQ ID NO: 343 - DNA, 2071 bp, Homo sapiens
  CDS (224)..(1183)
ctggcccggaaccccgggacgacccacgcgtccgcccacgcgtccgcctcgatcctgtgatgttggaggtggcaatgcttttccacataatggtcaaaacctaggcctctcacccttcttggggaccttgaacactggagggtcattgccagatctaaccaacctccactactcgacacccctgccagcctccctggacaccaccgaccaccactttggcagtatgagtgtggggaatagtgtgaacaacatcccagctgctatgacccacctgggtataagaagctcctctggtctccagagttctcggagtaacccctccatccaagccacgctcaataagactgtgctttcctcttccttaaataaccacccacagacatctgttcccaacgcatctgctcttcacccttcgctccgtctgttttcccttagcaacccatctctttccaccacaaacctgagcggcccgtctcggcgtcggcagcctcccgtcagccctctcacgctttctcctggccctgaagcacatcaaggtttcagcagacagctgtcttcaaccagcccactggccccatatcctacctcccagatggtgtcctcagaccgaagccaactttcctttctgcccacagaagctcaagcccaggtgtcgccgccacccccttaccctgcaccccaggagctcacccagcccctcctgcagcagccccgcgcccctgaggcccctgcccagcagccccaggcagcctcctcactgccacagtcagactttcagcttctcccggcccagggctcatctttgaccaacttcttcccagatgtgggttttgaccagcagtccatgaggccaggccctgcctttcctcaacaggtgcctctggtgcaacaaggttcccgagaactgcaggactcttttcatttgagaccaagcccgtattccaactgcgggagtctcccgaacaccatcctgccagaagactccagcaccagcctgttcaaagacctcaacagtgcgctggcaggcctgcctgaggtcagcctgaacgtggacactccatttccactggaagaggagctgcagattgaacccctgagcctggacggactcaacatgttaagtgactccagcatgggcctgctggacccctctgttgaagagacgtttcgagctgacagactgtgaacagaaggcagtggaacagaagaatgtttttctgcaacagccaaaatagaatggaatagaatgaagccagctgataccacgggctttcgttatcttgacataaaaggaagcaatgccacggctccagggtttcagatgagatcccatctcaaacactgtggcttcctccagatcacacagctttgtactgcctctcccgcctgtggccaaagtcgtgttgcagcaggcaggctgcttggagcttcccatgaactggaaagctcacctccactgcatctttttactggccatccagtcagccgatgtgtaagagtaggaaatactgtgtcactggaggcctccgtagcattgtgtagtgtgctcagaaccactgatctccgtccgcaccgaaggcgggcccggagtgggaggctcggcctggggcggcggcaccggagagggcacctcgatgcctgctctgacctgacccagagggcgaggccctccagcgggggacattcccaggctgagtggaccccacggctctctcccacgcctggattacgacatgaagtttttaccacaagcccgagggcaggcttgagttaggcagactgaaggctaattttcattttctcccagctggtttctgctgcttcagaaaagtacaccttttccttatggaccagaggaagaggaagaccattttatcagtcactgaaaagagtcccctggcactgatgagcctgaagagaactgtgctcctcctcgggggctggggaaggaagacagggactgcaggtgtctcatactcagtggcctccagacaaactccagacaagcacagacctccccactaagagcagccagagggagctggtgaggccctaaccccacccatgtatt

SEQ ID NO: 344 - DNA, 2437 bp, Homo sapiens
  CDS (1160)..(2206)
ggcctggatgacctcgggtacatcggctaccggagctacagcccatcattccagcgccggaccggcctcctccatgcgctctccttccgggactcaccctttggggggctgcctaccttcaacctggcccagtcccctgcgtcattcccaccagaggcctccgagccacccagggttgtacggccggaacccagcacccgggccctggagcctcctgcggaggatcgcggcgatgaggtggtcctgaggcagaagcccccgacgggccgcaaggttcagctgacccccgcaagacagatgaaccttggatttggtgacgagtccccagagccagaggccagtgggcgaggggaacgcctgggcaggaaggtggcccctttggccaccaccgaagactctctggcttccatcccctttattgatgagcccaccagccccagcattgacctccaagccaagcacgtccctgcctctgctgtggtctccagtgccatgaactcagcccctgtcctgggcaccagcccatcttccccgaccttcactttcaccctcggacgccattactcgcaggactgcagcagcatcaaggctggccgccgctcctcctacctgctggccatcaccacggagcgctccaagtcctgcgatgatggactcaacaccttccgcgacgagggccgggttctgcggcgcctgccaaaccgcatacccagcctgcggatgctccggagcttcttcaccgacgggtccttggatagctggggcacctctgaagatgctgacgctccttctaagcgacactcaacctctgacctctcagatgcgaccttcagcgatatcaggagagaaggctggttgtattataagcagattctcaccaagaaggggaagaaagcgggcagcggcctgcgccagtggaagcgggtgtacgccgcgctgcgggcgcgctcgctctcgctgagcaaggagcggcgggagcccgggccggcggcggcgggggctgcggcggccggccgcaggtgaggacgaggcggcgcccgtctgcatcggctcctgcctcgtggacatctcctacagcgagaccaagaggaggcacgtgttccggctgaccaccgctgacttctgtgaatatctctttcaggctgaggaccgggatgacatgctgggctggatcagagcgatccgggagaacagcagggccgagggcgaggaccccggctgtgccaaccaagctctgatcagcaagaagcttaatgattatcgcaaagtgagccatagctctgggcccaaagctgattcctcccccaaaggctctcgcggcctggggggcctcaagtctgagttcctcaagcagagtgcggcacgtggcctcaggactcaggacctgcccgcagggagcaaggatgacagtgctgcagcccccaaaaccccctggggcatcaacatcatcaagaaaaataagaaggccgctccgagggcgtttggggtcaggctggaggagtgccagccagccacggagaaccagcgcgtccccttaatcgtggctgcatgctgtcgcattgtggaggcacgagggctggagtccacaggcatttaccgagtgcccggcaacaatgcagtggtgtccagcctacaggagcagctcaaccgcgggcctggtgacatcaacctgcaggatgagcgctggcaagacctcaatgtgatcagcagcctgctcaagtccttcttccgaaagctgcccgagcctcttttcactgatgacaaatacaacgacttcatcgaggccaaccgcattgaggacgcgcgggagcgaatgaggacgctgcggaagctgatccgggatctcccaggacactactatgaaacgctcaaattccttgtgggccatctcaagaccatcgctgaccactctgagaaaaacaagatggaaccccggaacctggccctggtctttgggccgacactggtgaggacgtctgaggacaacatgacagacatggtgacccacatgcctgaccgctacaagatcgtggagacactgatccagcactcagactggttcttcagtgacgaagaggacaagggagagagaacccctgtgggcgacaaggagcctcaggcagtgcccaacattgagtacctcctgcccaacattggcaggacagtgccccctggcgacccggggtcagcggacctgttggagatttaaaggattctaccacctgtagttcagccaagtccaagggttcgtgggcccccaagaaggagccgtacgcccgggagatgctggcgatctccttcatctcggccgtcaaccgcaagcgcaagaagcggcgggaggcgcgggggctgggcagcagcaccgacgacgactcggagcaggaggcgcacaagcctggggcgggggccacagcgccggggactcaggagcggccgc

SEQ ID NO: 345 - DNA, 2109 bp, Homo sapiens
  CDS (1)..(2106)
atgagcctctggcagcccctggtcctggtgctcctggtgctgggctgctgctttgctgcccccagacagcgccagtccacccttgtgctcttccctggagacctgagaaccaatctcaccgacaggcagctggcagaggaatacctgtaccgctatggttacactcgggtggcagagatgcgtggagagtcgaaatctctggggcctgcgctgctgcttctccagaagcaactgtccctgcccgagaccggtgagctggatagcgccacgctgaaggccatgcgaaccccacggtgcggggtcccagacctgggcagattccaaacctttgagggcgacctcaagtggcaccaccacaacatcacctattggatccaaaactactcggaagacttgccgcgggcggtgattgacgacgcctttgcccgcgccttcgcactgtggagcgcggtgacgccgctcaccttcactcgcgtgtacagccgggacgcagacatcgtcatccagtttggtgtcgcggagcacggagacgggtatcccttcgacgggaaggacgggctcctggcacacgcctttcctcctggccccggcattcagggagacgcccatttcgacgatgacgagttgtggtccctgggcaagggcgtcgtggttccaactcggtttggaaacgcagatggcgcggcctgccacttccccttcatcttcgagggccgctcctactctgcctgcaccaccgacggtcgctccgacggcttgccctggtgcagtaccacggccaactacgacaccgacgaccggtttggcttctgccccagcgagagactctacacccaggacggcaatgctgatgggaaaccctgccagtttccattcatcttccaaggccaatcctactccgcctgcaccacggacggtcgctccgacggctaccgctggtgcgccaccaccgccaactacgaccgggacaagctcttcggcttctgcccgacccgagctgactcgacggtgatggggggcaactcggcgggggagctgtgcgtcttccccttcactttcctgggtaaggagtactcgacctgtaccagcgagggccgcggagatgggcgcctctggtgcgctaccacctcgaactttgacagcgacaagaagtggggcttctgcccggaccaaggatacagtttgttcctcgtggcggcgcatgagttcggccacgcgctgggcttagatcattcctcagtgccggaggcgctcatgtaccctatgtaccgcttcactgaggggccccccttgcataaggacgacgtgaatcgcatccggcacctctatgagcgccccacagctggccccacaggtcccccctcagctggccccacaggtccccccactgctggcccttctacggccactactgtgcctttgagtccggtggacgatgcctgcaacgtgaacatcttcgacgccatcgcggagattgggaaccagctgtatttgttcaaggatgggaagtactggcgattctctgagggcagggggagccggccgcagggccccttccttatcgccgacaagtggcccgcgctgccccgcaagctggactcggtctttgaggagcggctctccaagaagcttttcttcttctctgtcaaggaggctcaagagaccatcgataacccacgaaacgtcttgtgcgttttagaaaaatacgccccctggcggacgcagtttagcaaacggcgccaggtgtgggtgtacacaggcgcgtcggtgctgggcccgaggcgtctggacaagctgggcctgggagccgacgtggcccaggtgaccggggccctccggagtggcagggggaagatgctgctgttcagcgggcggcgcctctggaggttcgacgtgaaggcgcagatggtggatccccggagcgccagcgaggtggaccggatgttccccggggtgcctttggacacgcacgacgtcttccagtaccgagagaaagcctatttctgccaggaccgcttctactggcgcgtgagttcccggagtgagttgaaccaggtggaccaagtgggctacgtgacctatgacatcctgcagtgccctgaggactag

SEQ ID NO: 346 - DNA, 2335 bp, Homo sapiens
  CDS (20)..(1315)
agacacctctgccctcaccatgagcctctggcagcccctggtcctggtgctcctggtgctgggctgctgctttgctgcccccagacagcgccagtccacccttgtgctcttccctggagacctgagaaccaatctcaccgacaggcagctggcagaggaatacctgtaccgctatggttacactcgggtggcagagatgcgtggagagtcgaaatctctggggcctgcgctgctgcttctccagaagcaactgtccctgcccgagaccggtgagctggatagcgccacgctgaaggccatgcgaaccccacggtgcggggtcccagacctgggcagattccaaacctttgagggcgacctcaagtggcaccaccacaacatcacctattggatccaaaactactcggaagacttgccgcgggcggtgattgacgacgcctttgcccgcgccttcgcactgtggagcgcggtgacgccgctcaccttcactcgcgtgtacagccgggacgcagacatcgtcatccagtttggtgtcgcggagcacggagacgggtatcccttcgacgggaaggacgggctcctggcacacgcctttcctcctggccccggcattcagggagacgcccatttcgacgatgacgagttgtggtccctgggcaagggcgtcgtggttccaactcggtttggaaacgcagatggcgcggcctgccacttccccttcatcttcgagggccgctcctactctgcctgcaccaccgacggtcgctccgacggcttgccctggtgcagtaccacggccaactacgacaccgacgaccggtttggcttctgccccagcgagagactctacacccgggacggcaatgctgatgggaaaccctgccagtttccattcatcttccaaggccaatcctactccgcctgcaccacggacggtcgctccgacggctaccgctggtgcgccaccaccgccaactacgaccgggacaagctcttcggcttctgcccgacccgagctgactcgacggtgatggggggcaactcggcgggggagctgtgcgtcttccccttcactttcctgggtaaggagtactcgacctgtaccagcgagggccgcggagatgggcgcctctggtgcgctaccacctcgaactttgacagcgacaagaagtggggcttctgcccggaccaaggatacagtttgttcctcgtggcggcgcatgagttcggccacgcgctgggcttagatcattcctcagtgccggaggcgctcatgtaccctatgtaccgcttcactgaggggcccccccttgcataaggacgacgtgaatggcatccggcacctctatggtcctcgccctgaacctgagccacggcctccaaccaccaccacaccgcagcccacggctcccccgacggtctgccccaccggaccccccactgtccacccctcagagcgccccacagctggccccacaggtcccccctcagctggccccacaggtccccccactgctggcccttctacggccactactgtgcctttgagtccggtggacgatgcctgcaacgtgaacatcttcgacgccatcgcggagattgggaaccagctgtatttgttcaaggatgggaagtactggcgattctctgagggcagggggagccggccgcagggccccttccttatcgccgacaagtggcccgcgctgccccgcaagctggactcggtctttgaggagccgctctccaagaagcttttcttcttctctgggcgccaggtgtgggtgtacacaggcgcgtcggtgctgggcccgaggcgtctggacaagctgggcctgggagccgacgtggcccaggtgaccggggccctccggagtggcagggggaagatgctgctgttcagcgggcggcgcctctggaggttcgacgtgaaggcgcagatggtggatccccggagcgccagcgaggtggaccggatgttccccggggtgcctttggacacgcacgacgtcttccagtaccgagagaaagcctatttctgccaggaccgcttctactggcgcgtgagttcccggagtgagttgaaccaggtggaccaagtgggctacgtgacctatgacatcctgcagtgccctgaggactagggctcccgtcctgctttgcagtgccatgtaaatccccactgggaccaaccctggggaaggagccagtttgccggatacaaactggtattctgttctggaggaaagggaggagtggaggtgggctgggccctctcttctcacctttgttttttgttggagtgtttctaataaacttggattctctaaccttt

SEQ ID NO: 347 - DNA, 579 bp, Homo sapiens
  CDS (20)..(448)
tttcgtttgggcctggcccatggcggaaatgagagcttgtcgcccattggtccgaccttccctgcaatgcgtcaaactggggcgagccactgcaaggtggtggtgggtggtcaaggtgaagccccacgacaaggatgccaaaatgaaataccaggagtgcaacaagatcgtgaagcagaaggcctttgagcgggccatcgcaggcgacgagcacaagcgctccgtggtggactcgctggacatcgagagcatgaccatcgagggtgagtacagcggacccaagcttgaggacgacaaagtgacaatcaccttcatgaaggggctcatgcagtggtacaaggaccagaagaaactgcaccagaaatgcgcctaccaggtaatgcacctgtcaggtaccgggcacccaggaaccctgggatggcatcacagcactgccaggcgcgggcactgagcaaaatgacaggagaagggcagccacaacagccaacaccaaacaggagtcgtggtcattatggattggcagtaatccctcccaatattcagatacaataaactatctctacaaataaaaaaaaaaaa

SEQ ID NO: 348 - DNA, 582 bp, Homo sapiens
  CDS (79)..(249)
ccgacgatttcgtcggagtgggagacgtggagtgcaggtaatgcatgtccatggtacacaaattcacaaggtttgtaaatgagaaaagacgtgaggttccttttgttctttacctgtggcctccctgccctacacggggactctagggtggaatgtagcaaagcccatccaccagccatgtactaccccccaacccggccaggctggagcgaccgtgtctggggagccgagccccgcttctcgctgcggtgagcccggactaggggcacgcactgcgcagactccccgactgcagtgggcaggagctcccacaggccccgccccctcactcacgcaaaccgtcgaacagccggacaccagacagaaagcagggcgacaccaagaggagagatagcagacagacgacctgagcaacgagagccggaagagccacccatcaacaggacgtaaacaacaccacgcaacaacaagctagcccaacataaagaaacgtgccaaggacagagaagaaccatgcacaccacccaacatacacaaccatcgagctcatgccgaataacccccaaaccattgaccggaaca

SEQ ID NO: 349 - DNA, 3518 bp, Homo sapiens
  CDS (195)..(2417)
acacggacgacaccagttcggtgacctcctctgccagctccaccacttcctcccagagcggcagcggcacgagtcgcaaaaagagcatccccttgtccatcaagaacttaaagcgcaaacacaagaggaagaagaataaaatcactcgagacttcaagccaggggacagggtggcagtggaggtggtgaccacgatgacctcagccgacgtgatgtggcaggatggctccgtggaatgcaacatccgctccaacgacctcttccctgtgcaccacctggacaacaacgagttctgccctggagacttcgtggtagataagcgagtccagagctgtccagaccctgctgtctacggtgtggtacagtctggggaccacatcggccgtacctgcatggtgaagtggttcaagctgaggccgagtggggacgacgtggagctgattggagaagaggaagatgtgagtgtttacgacattgctgaccaccctgactttaggttccgtacaactgacatcgtcatccgcatcggcaatactgaggatggggctcctcacaaggaggatgagccatcggtgggccaggtggcccgtgtggacgtcagcagcaaggtggaggtggtgtgggctgacaactcaaagaccatcatcctgccccagcacttgtacaacatagagtctgagattgaggagtcagactacgattcggtagaaggcagcaccagcggggcatcctcggatgaatgggaagatgatagtgacagctgggagacggacaatgggctggtggaggacgagcaccccaagatagaggagccccccatcccacccctggagcagccggtggcccctgaggacaagggagtggtgatcagtgaagaggcagccacagctgccgtccagggggctgtggccatggctgcccccatggccgggctgatggagaaggctggcaaggacgggccacccaagagcttccgggagttgaaagaggccatcaagatcctggagagcctcaagaacatgactgtggagcagctgctgacgggctcgcccacctctccgactgtggagcctgagaagccaactcgggagaagaagtttctggatgacatcaagaagctacaggaaaacctcaagaagaccctggacaatgtggccattgtagaggaggagaagatggaagcagtgcccgacgtagagcgcaaggaggacaagcccgaggggcagtcacctgtgaaggctgagtggcccagcgaaaccccggtgctgtgccagcagtgtggcggcaagcctggcgtcaccttcaccagcgccaagggcgaggtcttctccgtactggagtttgcaccctcaaatcattcttttaagaaaattgagttccagcctccagaagccaagaagttcttcagcacagtgcggaaggagatggcgctgctggctacctcactgcctgagggcatcatggtcaagacttttgaagatagaatggacctcttctcagctctcatcaagggccccactcgaaccccctacgaggatggcctctacttgtttgacatccagctccccaacatctacccagccgtgcccccccacttctgctacctctcccaatgcagtggccgcctgaaccccaacctgtatgacaatgggaaggtgtgtgtcagcctcctgggcacctggattggaaaggggacagagaggtggacaagcaagtccagccttctccaggtgctcatctccatccaaggtctgatcctggtaaatgaaccatactacaacgaagccggcttcgacagtgaccgaggcctgcaggaaggctatgaaaacagtcgctgttacaatgagatggcgctgatccgcgtggtgcagtccatgacccagctggtgcggcggccccccgaggtctttgagcaggagatcaggcaacactttagcactggtggctggcggctggtgaaccgtatcgagtcctggctggaaacccatgccctgctggagaaggcccaggcactgcccaacggggtgcccaaggccagcagctcgccagagcccccagctgtagccgagctgtcagactccggccaacaagaacctgaggatggagggccagccccaggagaggcctcccagggctcagactcagagggcggtgcccagagcctggcctcagctagcagggaccacacagaccagacttcggagaccgcaccagacgcatcggtgccacccagtgtgaaaccaaagaagcggagaaagagctaccggagcttcttacctgagaagagtggctaccctgacatcggcttccccctcttcccactttccaagggtttcatcaagagcatccggggtgtcctgacgcagttccgggctgccctgctagaggcaggcatgccggagtgcacagaggacaagtagctgccaggcacagaggaaagagcatcaccgtgggagaggccagccgccgcctgctcactcccccccggaatcacccctcttcccatgcccctctgtccccactgcaaacccactgccctcttctccccaaggtgagtttgatgctgaagtgcaagaagtgtgttgagatgctgccgtttctattttgaagcgagctttcaacaggcgggtcccctgtggcaaagaaaatcggaaccctgttgccgattttccatttgtcaccccagcagaatgtccggcacttgctcccttgctgccccttctcaggtcagaggcgggtgttccagggcctgccgcggggctctctgggccggttccctgcagacccgcaggagagcacatgtgccttgcatgaagtgtgggttgcgccaacaattcccctggtccctttcaacctgtttagttcaactcaagcctccctgtgtcccagaccctcctgctgccaccaccacccaggtcctccctagtcctccagcgtcaacactatcccttgggagttgtagctgctgtcactgactcccggctatacatggcctgtcgaccacgttatagccctcaggcctgttgaacttgctctctaagagaggttgggaccaggctaggttccgggtgacgcccaggagaggtggtggccttcacacatgcacatggagttgaggaccagggagctgcagggaaagcaacagctataggtgccttgctcttctgtcggaggctgctgggggcaagagcagctgcacaaggccagggcaagtgctagggcccctcccccatcacatggtcacactgggacaggcgtgcagctcactgaactccaagcgagccagccctctcttggactagaaggcctactgtcagcccttcgcttacaaactgcaggctcaatccgaaggggacggccggcgggggctctcctagtgcccagagacaggcccagaggtttacaagttttttaagcttttgataatgtgaagctccaggccgagaggatgctgttgagcacattgcagctatgtaatttttggtgtatgtatgtaatatttaaggttggaaaaaaaa

SEQ ID NO: 350 - DNA, 6599 bp, Homo sapiens
  CDS (78)..(6596)
acggccctcagatgctggcatatatacatgtgttgctactaacatagcaggcactgatgaaacagagataacgctacatgtccaagaaccacccacagatggaagatctagaacctccatataacactactttccaagaaagagtggccaatcaacgcattgaattttcatgtcctgcaaaaggtacccctaaaccaaccatcaaatggttacacaatggtagagagttgacaggcagagagcctggcatttctatcttggaagatggcacattgctggttattgcttctgttacaccctatgacaatggggagtacatctgtgtggcagtcaatgaagctggaaccacagaaagaaaatataacctcaaagtccatgttcctccagtaattaaagataaagaacaagttacaaatgtgtcggtgttgttaaatcagctgaccaatctcttctgtgaagtggaaggcactccatctcccatcattatgtggtataaagataatgtccaggtgactgaaagcagcactattcagactgtgaacaatgggaagatactgaagctcttcagagccactccagaggatgcaggaagatattcctgcaaagcaattaatattgcaggcacttctcagaagtactttaacattgatgtgctaggtaccaacttcccaaatgaagtctcagttgtcctcaaccgtgacgtcgcccttgaatgccaggtcaaaggcactccctttcctgatattcattggttcaaagatggcaatattaaaggaggaaatgtcaccacagacatatcagtattgatcaacagccttattaaactggaatgtgaaacacggggacttccaatgcctgccattacttggtataaggacgggcagccaatcatgtccagctcacaagcactttatattgataaaggacaatatcttcatattcctcgagcacaggtctctgattcagcaacatatacgtgtcacgtagccaatgttgctggaactgctgaaaaatcattccatgtggatgtctatgttcctccaatgattgaaggcaacttggccacgcctttgaataagcaagtagttattgctcattctctgacactggagtgcaaagctgctggaaacccttctcccattctcacctggttgaaagatggtgtacctgtgaaagctaatgacaatatccgcatagaagctggtgggaagaaactcgaaatcatgagtgcccaagaaattgatcgaggacagtacatatgcgtggctaccagtgtggcaggagaaaaggaaatcaaatatgaagttgatgtcttggtgccaccagctatagaaggaggagatgaaacatcttacttcattgtgatggttaataacttactggagctagattgtcatgtgacaggctctcccccaccaactatcatgtggctgaaggatggccagttaattgatgaaagggatggattcaagattttattaaatggacgcaaactggttattgctcaggctcaagtgtcaaacacgggcctttatcggtgcatggcagcaaatactgctggagaccacaagaaggaatttgaagtgactgttcatgttcctccaacaatcaagtcctcaggcctttctgagagagttgtggtaaaatacaagcctgtcgccttgcagtgcatagccaatgggattccaaatccttccattacatggttaaaagatgaccagcctgtgaacactgcccaaggaaaccttaaaatacagtcttctggtcgagttctacaaattgccaaaaccctgttggaagatgctggcagatacacatgtgtggctaccaacgcagctggagaaacacaacagcacattcaactgcatgttcatgaaccacctagtctggaagatgctggaaaaatgctgaatgagactgtgttggtgagcaaccctgtacagctggagtgtaaggcagctggaaatcctgtgcctgttattacatggtacaaagataatcgtctactctcaggttccaccagcatgactttcttgaacagaggacagatcattgatattgaaagtgcccagatctcagatgctggcatatataaatgcgtggccatcaactcagctggagctacagagttattttacagtctgcaagttcatgtggccccatcaatttctggcagcaataacatggtggcagtggtggttaataacccggtgaggttagaatgtgaagccagaggtattcctgccccaagtctgacctggttgaaagatgggagtcctgtttctagtttttctaatggattacaggttctctctggtggtcgaatcctagcattgaccagtgcacaaatcagcgacacaggaaggtacacctgcgtggcagtgaatgctgctggagaaaagcaaagggacattgacctccgagtatatgttccgccaaatattatgggagaagaacagaatgtctctgtcctcattagccaagctgtggaattactatgtcaaagtgatgctattcccccacctactcttacttggttaaaagacggccaccccttgctgaagaaaccaggcctcagtatatctgaaaatagaagtgtgttaaagattgaagatgctcaggttcaagacactggtcgttacacttgtgaagcaacaaatgttgctggaaaaactgaaaaaaactacaatgtcaacatttgggtccccccaaatattggtggttctgatgaacttactcaacttacagtcattgaagggaatctcattagtctgttgtgtgaatcaagtggtattccacccccaaatctcatctggaagaagaaaggctctccagtgctgactgattccatggggcgagttagaattttatctgggggcaggcaattacaaatttcaattgctgaaaagtctgatgcagcactctattcatgtgtggcgtcgaatgttgctgggactgcaaagaaagaatacaatctgcaagtttacattagaccaaccataaccaacagtggcagccaccctactgaaattattgtgacccgagggaagagtatctccttggagtgtgaggtgcagggtattccaccaccaacagtgacctggatgaaagatggccaccccttgatcaaggcaaagggagtagaaatactggatgaaggtcacatccttcagctgaagaacattcatgtatctgacacaggccgttatgtgtgtgttgctgtgaatgtagcaggaatgactgacaaaaaatatgacttaagtgtccatggaggcaggatgctacggctgatgcagaccacaatggaagatgctggccaatatacttgcgttgtaaggaatgcagctggtgaagaaagaaaaatctttgggctttcagtattagtaccacctcatattgtgggtgaaaatacattggaagatgtgaaggtaaaagagaaacagagtgttacgctgacttgtgaagtgacagggaatccagtgccagaaattacatggcacaaagatgggcagcccctccaagaagatgaagcccatcacattatatctggtggccgttttcttcaaattaccaatgtccaggtgccacacactggaagatatacatgtttggcttccagtccagctggccacaagagcaggagcttcagtcttaatgtatttgtatctcctacaattgctggtgtaggtagtgatggcaaccctgaagatgtcactgtcatccttaacagccctacatctttggtctgtgaagcttattcatatcctccagctaccatcacctggtttaaggatggcactcctttagaatctaaccgaaatattcgtattcttccaggaggcagaactctgcagatcctcaatgcacaggaggacaatgctggaagatactcttgtgtagccacgaatgaggctggagaaatgataaagcactatgaagtgaaggtgtacacacttaatgctaacattgttataattgaatcacagccccttaaatccgatgatcatgttaatattgctgcgaatggacacacacttcaaataaaggaggctcaaatatcagacaccggacgatatacttgtgtagcatctaacattgcaggtgaagatgagttggattttgatgtgaatattcaagttcctccaagttttcagaaactctgggaaataggaaacatgctagatactggcaggaatggtgaagccaaagatgtgatcatcaacaatcccatttctctttactgtgagacaaatgctgctccccctcctacactgacatggtacaaagatggccaccctctgacctcaagtgataaagtattgattttgccaggagggcgagtgttgcagattcctcgggctaaagtagaagatgctgggagatacacatgtgtggctgtgaatgaggctggagaagattcccttcaatatgatgtccgtgtactcgtgccgccaattatcaagggagcaaatagtgatctccctgaagaggtcaccgtgctggtgaacaagagtgcactgatagagtgtttatccagtggcagcccagcaccaaggaattcctggcagaaagatggacagcccttgctagaagatgaccatcataaatttctatctaatggacgaattctgcagattctgaatactcaaataacagatatcggcaggtatgtgtgtgttgctgagaacacagctgggagtgccaaaaaatattttaacctcaatgttcatgttcctccaagtgtcattggtcctaaatctgaaaatcttaccgtcgtggtgaacaatttcatctctttgacctgtgaggtctctggttttccacctcctgacctcagctggctcaagaatgaacagcccatcaaactgaacacaaatactctcattgtgcctggtggtcgaactctacagattattcgggccaaggtatcagatggtggtgaatacacttgtatagctatcaatcaagctggcgaaagcaagaaaaagttttccctgactgtttatgtgcccccaagcattaaagaccatgacagtgaatctctttctgtagttaatgtaagagagggaacttctgtgtctttggagtgtgagtcgaacgctgtgccacctccagtcatcacttggtataagaatgggcggatgataacagagtctactcatgtggagattttagctgatggacaaatgctacacattaagaaagctgaggtatctgacacaggccagtatgtatgtagagctataaatgtagcaggacgggatgataaaaatttccacctcaatgtatatgtgccacccagtattgaaggacctgaaagagaagtgattgtggagacgatcagcaatcctgtgacattaacatgtgatgccactgggatcccacctcccacgatagcatggttaaagaaccacaagcgcatagaaaattctgactcactggaagttcgtattttgtctggaggtagcaaactccagattgcccggtctcagcattcagatagtggaaactatacatgtattgcttcaaatatggagggaaaagcccagaaatattactttctttcaattcaagttcctccaagtgttgctggtgctgaaattccaagtgatgtcagtgtccttctaggagaaaatgttgagctggtctgcaatgcaaatggcattcctactccacttattcaatggcttaaagatggaaagcccatagctagtggtgaaacagaaagaatccgagtgagtgcaaatggcagcacattaaacatttatggagctcttacatctgacacggggaaatacacatgtgttgctactaatcccgctggagaagaagaccgaatttttaacttgaatgtctatgttacacctacaattaggggtaataaagatgaagcagagaaactaatgactttagtggatacttcaataaatattgaatgcagagccacagggacgcctccaccacagataaactggctgaagaatggacttcctctgcctctctcctcccatatccggttactggcagcaggacaagttatcaggattgtgagagctcaggtgtctgatgtcgctgtgtatacttgtgtggcctccaacagagctggggtggataataagcattacaatcttcaagtgtttgcaccaccaaatatggacaattcaatggggacagaggaaatcacagttctcaaaggtagttccacctctatggcatgcattactgatggaaccccagctcccagtatggcctggcttagagatggccagcctctggggcttgatgcccatctgacagtcagcacccatggaatggtcctgcagctcctcaaagcagagactgaagattcgggaaagtacacctgcattgcctcaaatgaagctggagaagtcagcaagcactttatcctcaaggtcctagatgcgaaaaaagcatttgatgaaattcaacattccttcatgagaaaaaccctcaacaaattagggatagaagatacatacctcaacacaataaagactatttatgataaatccacagctaacatcacactaaacaggaaaaagttgaaagcctttcctacaaggtctagcagaagataa

SEQ ID NO: 351 - DNA, 2366 bp, Homo sapiens
  CDS (639)..(2363)
acactcacacccggaccctcaccacctgccaacccctcacaaccagtacagtaaccaaacccgtcaccgtcttttcccagtctctcatccccacaaacgactctccaggccctctggcccatgcgtaccgttcactcacggaacgccgaacctggccgggcccggttgctgctgcggtgttagaaggactccggcgtgtcataggcgaaggcctctgggaaggtggaggccggcagggcggaggcggagcccgggaaggaaaggtggaaccagagggcagaaggcgggacctaaggagaggcgatttttacaggcagggaaagatcagaagggcggggcttgggagagatggagccggaagaaagacgagcgagaaaggggtggggccatggattccaggagacgcttggagtggaagagtgggtgtggaggggcgaggctatcacgaaaagagaggaggaatcagtagtagcgctagctctggttgtgttgctaagagccccaaagacaaagaagtcacagcagaagcccaacagcagcctccttcaggcagtcaggcactagtgcccaactccagaagtcccctacaggcagagagggtgtggacatctcacaccccagcaccagaccacagaaccatgagccaggacaccaaagtgaagacaacagagtccagtcccccagccccatccaaggccaggaagttgctgcctgtcctggacccatctggggattactactactggtggctgaacacaatggtcttcccagtcatgtataacctcatcatcctcgtgtgcagagcctgcttccccgacttgcagcacggttatctggtggcctggttggtgctggactacacgagtgacctgctatacctactagacatggtggtgcgcttccacacaggattcttggaacagggcatcctggtggtggacaagggtaggatctcgagtcgctacgttcgcacctggagtttcttcttggacctggcttccctgatgcccacagatgtggtctacgtgcggctgggcccgcacacacccaccctgaggctgaaccgctttctccgcgcgccccgcctcttcgaggccttcgaccgcacagagacccgcacagcttacccaaatgcctttcgcattgccaagctgatgctttacatttttgtcgtcatccattggaacagctgcctatactttgccctatcccggtacctgggcttcgggcgtgacgcatgggtgtacccggaccccgcgcagcctggctttgagcgcctgcggcgccagtacctctatagcttttacttctccacgctgatactgactacagtgggcgatacaccgccgccagccagggaagaagagtacctcttcatggtgggcgacttcctgctggccgtcatgggtttcgccaccatcatgggtagcatgagctctgtcatctacaacatgaacactgcagatgcggctttctacccagatcatgcactggtgaagaagtacatgaagctgcagcacgtcaaccgcaagctggagcggcgagttattgactggtatcagcacctgcagatcaacaagaagatgaccaacgaggtagccatcttacagcacttgcctgagcggctgcgggcagaagtggctgtgtctgtgcacctgtccactctgagccgggtgcagatctttcagaactgtgaggccagcctgctggaggagctggtgctgaagctgcagccccagacctactcaccaggtgaatatgtatgccgcaaaggagacattggccaagagatgtacatcatccgagagggtcaactggccgtggtggcagatgatggtatcacacagtatgctgtgctcggtgcagggctctactttggggagatcagcatcatcaacatcaaagggaacatgtctgggaaccgccgcacagccaacatcaagagcctaggttattcagacctattctgcctgagcaaggaggacctgcgggaggtgctgagcgagtatccacaagcacagaccatcatggaggagaaaggacgtgagatcctgctgaaaatgaacaagttggacgtgaatgctgaggcagctgagatcgccctgcaggaggccacagagtcccggctacgaggcctagaccagcagctggatgatctacagaccaagtttgctcgcctcctggctgagctggagtccagcgcacttaagattgcttaccgcattgaacggctggagtggcagactcgagagtggccaatgcccgaggacctggctgaggctgatgacgagggtgagcctgaggagggaacttccaaagatgaagagggcagggccagccaggagggacccccaggtccagagtga

SEQ ID NO: 352 - DNA, 731 bp, Homo sapiens
  CDS (307)..(636)
taagccatatatcatgaactttattccaaatgagattgctaacttactgggcaactttaggaaagccccttaacctgtctggggctcagttttcacacaaatccaaaaatccttgcaaaaaaaggggcagttctcgttcaggcagcaggaggcgctgtctctggaggcttaaattcattccccgccctccgcccgctcccgcccgcctttggggcgcaggcgcggtttcgcggattggccgcgcgcgggggccgtcattcggtggcgggtcccggccgcggggctggcgggctgaggggaaaaaagatggcggcggcggcggcagctggtgcggcctccgggctgccgggtccagtggcacaaggattaaaggaagcgttagtggatacgctcaccgggatcctatccccagtacaggaggtgcgggcggctgctgaagaacagattaaggtgctggaggtgacggaggaatttggtgttcacttggcagaactgactgtagatccccagggggcactggcaatccgtcagctggcatcagtcatcttgaaacaatatgtggagactcactggtgtgcccaatcagagaaatttaggcctcctgaaactacagaaagggtaagtcagttacttgattagtctacctgaggagatttgagggtccattttaagagattagactataacattctttgacagcatggagcaatcaaaagactaggcagaaaagg

SEQ ID NO: 353 - DNA, 939 bp, Homo sapiens
  CDS (307)..(846)
actagggcaagcaggaagagagtcctccttctggaactgaagcaggcagtgtgaagacccatgtggaacaccttaacccgaagcctctctgaccatccagttggcaaagaccctcaggccatgaggactggccaaagacaaggtcttctgtgggaacaaagggtttgaagcgctgagaatgggaccctcaggagaggaagactgtgagaggacgtgcaagggtaaattcctgagccccgcagtcttatttcctgccctgacgtccctgcataccagcccaagggttaaccgtaagctgatgcctgtatggcggccttactgatgccacgcaggaacaaagggatgaggactcgactgggatgcctgtctcacaagtcagactcgtgtagtgatttcacagctattcttccagacaaacccaaccgcgctctcaagagattatcgacagaagaagctacgaggtgggcagattcctttgatgtgcttctctctcataagtatggggtggctgcattccgtgccttcttgaagacggagttcagtgaggagaacctggaattctggttggcctgtgaggagttcaagaagaccaggtcaactgcaaaactggtctctaaggcccataggatctttgaggagtttgtggatgtgcaggctccacgggaggtaaacattgacttccagacccgagaagccacgaggaagaacctgcaggagccatccctgacttgctttgaccaagcccaaggaaaagtacacagcctcatggagaaagactcttaccccaggttcctgaggtccaaaatgtacttagatctgctgtcccaaagccagaggaggctcagttagacctcagaagggaactcctggaaatcaccggctttcccctccacttgctgccaagatcatattctaatgtgaaatgtcaaaaaaaaaaaa

SEQ ID NO: 354 - DNA, 2138 bp, Homo sapiens
  CDS (143)..(850)
agggacttttgctcccacaagtcctgcctcggaggcgggggagctggaccagcagccgcctggagcgtccgagtcaccgtcgccggggctcccgcgctccccagaacggtgggacgcggggctcggcagccgccagcggaacatggcgccctggacgctgtggcgctgctgccagcgcgtcgtgggctgggtgccggtgctcttcatcaccttcgtggtcgtctggtcctactacgcgtacgtggtggagctctgcgtgtaccacgttgatgagcgaacaatatgcaatggaattgccccagaaaaagatgtagatggatttcatattatcaatattggaagattgtgccttgatcagcattctctcatacctgccactgccagtgctgtttgggaaataataaaaagaacaggaattcaaacatttggaaaaaatgtggttgtggctggaagatccaagaacgtagggatgcctattgccatgcttttacacactgatggagagcatgaacggccaggaggtgatgcaactgtgacaatagctcacagatacacccccaaagagcaactgaagattcatacgcagctggcagatattatcatagttgctgcaggtattccaaagttgattacgtctgatatggttaaagaaggtgctgctgtaattgatgtgggtatcaactatgtccacgatccagtgacaggaaagacaaaattagttggagatgtggacttcgaagctgttaaaaagaaagctggctttatcactccagttccaggaggtgtgggacccatgacagtggcaatgcttctgaagaacacccttctggcagctaaaaaaatcatttactagatcacatgaaaggataaagcaaactgaagtcatgctatttgtttatttgacaaagggtaaaacctttatattttactacaaagctatttatttctacatggtatttattttttcatgggtgaaatcattgtgaatcaattgattcacatagttttatgcatttcctgctaatttattttgagttttaagaaaacaaccaaaacaattccaatgaaaattttagtaacaattgtttattttgagggtatttgttcataacattaaaacaataaagggctcataataaataaatatatttttgacacaattaaatattacatagagtatgtttacaacaaatatcctgtcagccaaatggttacccatataaaatgtaatttaggttttgctacttgcatgctaacatttttaatgtattttatgatctatgtcatatattaaaaaagagcttgcttactacaagaaaaatattgaaatattgaaaatattgaaaatattattattgaaaataaaatcttgatctcaactatcccccaaatgcatcctataagtccatcctaatgagaaatgatgttctatttaaggaaaggaaaatattccgggaaggcaaaaaatgcagtgctgtttggaagtgtaatgattttatcacatggtgaatgactactaagagtaatgattatatcacattgtgaatgactacttgccacagtaaaaatacatgaagaatgtgttaggtttaaacgtcgtttctttcttctaaaaaatatttggttagtaccttcactgagcaatagtggaaaaataaaaaaataagtaaacagaaaaaactaaagttgtattttcccacaaatatagtatgaatgaggtcatattaaagaacagcaactgttaatgtttgttcacaaattcagaaatctaataggaaaaatgatactttcaatgtgccaaaactaaaccttagtatacaactaaaaatctcctgccttcttgcctacctgtcttccctcttctgttacagaatttgttcctcaaagtagatgcaatgtttctaacacaatttaaattaggaaatatatatgaatgtcgttgaagtctattttgagactgctaaagctattaattgatactgtgtttttatgcccaaatcccagtatgtttatgtaccaataatgactcttacccagcgcatgtctttatcagtgtgtactcgtgacgatttgtgtgaaaatagacttgatgtttataattaataccattacaactgtataataaaagcaatttgaag

SEQ ID NO: 355 - DNA, 2226 bp, Homo sapiens
  CDS (211)..(1212)
agagtcgagagtgggagaagagcggagcgtgtgagcagtactgcggcctcctctcctctcctaacctcgctctcgcggcctacctttacccgcccgcctgctcggcgaccagaacaccttccaccatgaccacctcagcaagttcccacttaaataaaggcatcaagcaggtgtacatgtccctgcctcagggctgagaaagtccaggccatgtatatctggatcgatggtactggagaaggactgcgctgcaagacccggaccctggacagtgagcccaagtgtgtggaagagttgcctgagtggaatttcgatggctccagtactttacagtctgagggttccaacagtgacatgtatctcgtgcctgctgccatgtttcgggaccccttccgtaaggaccctaacaagctggtgttatgtgaagttttcaagtacaatcgaaggcctgcagagaccaatttgaggcacacctgtaaacggataatggacatggtgagcaaccagcacccctggtttggcatggagcaggagtataccctcatggggacagatgggcacccctttggttggccttccaacggcttcccagggccccagggtccatattactgtggtgtgggagcagacagagcctatggcagggacatcgtggaggcccattaccgggcctgcttgtatgctggagtcaagattgcggggactaatgccgaggtcatgcctgcccagtgggaatttcagattggaccttgtgaaggaatcagcatgggagatcatctctgggtggcccgtttcatcttgcatcgtgtgtgtgaagactttggagtgatagcaacctttgatcctaagcccattcctgggaactggaatggtgcaggctgccataccaacttcagcaccaaggccatgcgggaggagaatggtctgaagtacatcgaggaggccattgagaaactaagcaagcggcaccagtaccacatccgtgcctatgatcccaagggaggcctggacaatgcccgacgtctaactggattccatgaaacctccaacatcaacgacttttctgctggtgtagccaatcgtagcgccagcatacgcattccccggactgttggccaggagaagaagggttactttgaagatcgtcgcccctctgccaactgcgaccccttttcgggtgacagaagccctcatccgcacgtgtcttctcaatgaaaccggcgatgagcccttccagtacaaaaattaagtggactagacctccagctgttgagcccctcctagttcttcatcccactccaactcttccccctctcccagttgtcccgattgtaactcaaagggtggaatatcaaggtcgtttttttcattccatgtgcccagttaatcttgctttcttttgtttggctgggatagaggggtcaagttattaatttcttcacacctaccctcctttttttccctatcactgaagctttttagtgcattagtggggaggagggtggggagacataaccactgcttccatttaatggggtgcacctgtccaataggcgtacgtatccggacagagcacgtttgcagaagggggtctcttcttccaggtagctgaaaggggaagacctgacgtactctggttaggttaggacttgccctcgtggtggaaacttttcttaaaaagttataaccaacttttctattaaaagtgggaattaggagagaaggtaggggttgggaatcagagagaatggctttggtctcttgcttgtgggactagcctggcttgggactaaatgccctgctctgaacacgaagcttagtataaactgatggatatccctaccttgaaagaagaaaaggttcttactgcttggtccttgatttatcacacaaagcagaatagtatttttatatttaaatgtaaagacaaaaaactatatgtatggttttgtggattatgtgtgttttggctaaaggaaaaaaccatccaggtcacggggcaccaaatttgagacaaatagtcggattagaaataaagcatctcattttgagtagagagcaagggaagtggttcttagatggtgatctgggattaggccctcaagaccccttttgggtttctgccctgcccaccctctggagaaggtgggcactggattagttaacagaccaacaccgttactagcagtcacttgatctccgtggctttggtttaaaagacacact

SEQ ID NO: 356 - DNA, 683 bp, Homo sapiens
  CDS (326)..(631)
gaccggccggattcccggggtgttctgtgaagttttcaagtgcaatcgaaagcctgcagagaccaatttgaggcacacctgtaaacggataagggacatggtgagcaaccagcacccctggtttggcatggagcaggaatatataatctcatggggacagacgggcacccctttggttggccttccagtggattccctgagccccagggtccatcttaactgtagtatgtgagcagacaaaacctatggcagggacattgtggaggctcattaccgggcctgcttgtattctggagtcaagattgcagggactaatgctgaggtcatgcctgcccagtggaaattccaaatcggaccctgtgaaggaatcagcatggaagatcatctctgggtgacctgtttcatcttacatcgtgtatgtgaagacttcggagtgatagcaacctttgatcctaagcccattcctgggaactggaatggtgcaggctgccataccaacattagcaccaaggccatgcgggagaatggtctgaaatacattgaggaggccatcaagaaactaagcaagcaacagcagtaccacatccacattcccatgaaacttctaacatcaacgacttttctgctcttatagcccatcatagtgccagcatacacattccccagacctcagaacaacgaca

SEQ ID NO: 357 - DNA, 1082 bp, Homo sapiens
  CDS (303)..(881)
tttcgtcgcagggcgggggtggggcaccgggtgacgaagggctgccgagaattaacccccgaaccgccgcgagctgtccctagcagtgccttagccagggacctgcttggccagcgacagatcctttgctgctctgtctgccggttcttgaggtgaatgtcggaatccattatctttcgggaaagctctctggggcagggagcgtcctggggagttggaattcagaaggaatctctcagacgcaaatctccatctcctccctgcctcacctgggcagccttttcagactgtctctgcccagaatgtcaggagaggccacagtcttggcctaccatgctccagaagaacaggaaggacttctagttgtcaaggttgaagaagaaaattatgttttggaccaggactttggccttcaggaaaacccctggagccaagaggtattccggcagaagttcaggcagtttagttactctgactccactggccctcgggaggctctgagccggctgcgagagctttgctgtcagtggttgaggccggaggtgcactccaaggagcagatcctggagctgctgatgttggagcagttcctggccatccttcctgaggagctgcaagcttggctgcgagagcatcggccagagaatggagaggaagctgtgactatgctggaggagctggaaaaagaactggaggagccaaggcaacaggacacaactcatggccaagaaatgttctggcaggaaatgacatccacaggagcactgaagtctctgtctctgaatagcccggtgcagcccttagagaaccagtgcaagactgagactcaggagtcccaggctttccaggagagaggtgagaagccccagtccatgtggggttgaggatggaggtgagagctatcaactgtggcacggttcattttcttaacgacagccacttgtggctatcactaagtattgtggaaaggcttctttgcctagaaatattcttccttaggctctgcctagaatctgaaattccagtatcatttgtaactttgggttaagaattaaagtctttagtaaaattcaaaaaaaaaa

SEQ ID NO: 358 - DNA, 1232 bp, Homo sapiens
  CDS (323)..(937)
gcagccacttgagatcaccaggcctcctgtagaccggcgggtgcagggcccggtcccagagttaagggtgaaagtcgtttggaaaccccaggccaacaggaccctttggcagctgaggctggaaacagcggaaccaaaggcagacggtcctcagttgcttgggcggacgtggacccaatctgtccgtccttacaagtttcccccaggggcaggacctagacgcgcggcgcattcaggttctcctggaccgtagtggtagtcgctggcccgagttagaggccagctgagaagtcttcgtgcttcagatttgtttacctacaaaatgcttcggtatccatatttttgtagaatgtataaagaatgcctttcatgttggttggaatctggcatacctaatttaggtgtctggccaaacagaatacatactacagcagaaaaatatagagaatatgaagcccgggagcaaacagatcaaactcaagcccaggagttacacagatctcaagatagagattttgaaactatggctaaattacatattccagtaatggtggatgaagttgttcattgtttgtcaccacaaaaaggacagatttttctagatatgacatttggttcgggagggcacacaaaagccattctgcagaaggagtcagatattgttctctatgccttggacagagacccaacagcttatgcattagctgaacatctttcagagttgtatcctaaacaaatccgagctatgctgggccagttcagccaggcagaagccttattaatgaaagctggagtgcagccaggaacttttgatggagttcttatggatcttgggtgttcctccatgcaacttgatactcctgaaagaggtttttcccttcggaaagatggccctttggacttggagattcggtgggtgggcgatcaaccgggcctgtgatttatgtcctagaaacctaagggggggagaaacgttgccaaaaaagggtttgcattgttcgggccgtgattacccgaaccgaacctagatggaacgagtgtgggcgaatgtgaaattcccggaggtcctcttcatgtgcatgcgcccgtagacgagggtgtaccgctgaatgagagaatgagcgatcacagcagaatcgatcatatggaagaacaacgcagaaaagaagaggtgaggactcagaagaagagtgagcagcacagaaggccgtcgacacgcctctctcttcttt

SEQ ID NO: 359 - DNA, 2816 bp, Homo sapiens
  CDS (228)..(2813)
aggaacacggttctgcctcggaaggcgagtttttaccattgcaacacaaagaacagaggagcgcgctttcacatcgttgcaacttaactcacttgaccagctctatacttcagcaccacggagagcggtacatccttggctaccacccatggggagccagcttctggcgactcaacaccggattccggtcatctagaggaggaacaagcctgcgtattacaccctcaatgttgaggaacagcaccttcaaaaacatgcagcgccggcacacaacgctgagggagaagggccgtcgccaggccatccggggtcccgcctacatgttcaacgagaagggcaccagtctgacgcccgaggaggagcgcttcctggactcggctgagtatggcaacatcccggtggtccggaaaatgctggaggagtccaagacccttaacttcaactgtgtggactacatggggcagaacgctctgcagctggccgtgggcaacgagcacctagaggtcacggagctgctgctgaagaaggagaacctggcacgggtgggggacgcgctgctgctggccatcagcaagggctatgtgcgcatcgtggaggccatcctcaaccacccggccttcgcgcagggccagcgcctgacgctcagcccgctggaacaggagctgcgcgacgacgacttctatgcctacgacgaggacggcacgcgcttctcccacgacatcacgcctatcatcctggcggcgcactgccaggagtatgagatcgtgcacatcctgctgctcaagggcgcccgcatcgagcggccccacgactacttctgcaagtgcaatgagtgcaccgagaaacagcggaaagactccttcagccactcgcgctcgcgcatgaacgcctacaaaggactggcgagtgctgcctacttgtccctgtccagcgaagaccctgtcctcaccgccctggagctcagcaacgagttagccagactagccaacattgagactgaatttaagaacgattacaggaagttatctatgcaatgcaaggattttgtagtgggcgtgctggacctgtgccgagacacagaagaggtggaagcaattttaaacggtgatgtgaacttccaagtctggtccgaccaccaccgtccaagtctgagccggatcaaactcgccattaaatatgaagtcaagaagttcgttgctcatcctaactgtcagcagcaattgcttaccatgtggtatgaaaatctctcaggcttacgtcaacagtctatcgctgtgaaattcctggctgtctttggagtctccataggcctcccttttctcgccatagcctattggattgctccgtgcagcaagctaggacgaaccctgaggagccctttcatgaagtttgtagctcatgcagtttcttttacaatcttcttgggattattagttgtgaatgcatctgaccgatttgaaggtgttaaaaccctgccaaacgaaaccttcacagactacccaaaacaaatcttcagagtgaaaaccacacagttctcctggacagaaatgctcattatgaagtgggtcttaggaatgatttggtccgaatgcaaggaaatctgggaggaggggccacgggagtacgtgctgcacttgtggaacctgctagatttcgggatgctgtccatcttcgtggcctccttcacagcacgcttcatggccttcctgaaggccacggaggcacagctgtacgtggaccagcacgtgcaggacgacacgctgcacaatgtctcgcttccgccggaagtggcatacttcacctacgccagggacaagtggtggccttcagaccctcagatcatatcggaagggctctacgcgatagccgtcgtgctgagcttctctcgcattgcatacattctgccagccaacgagagttttgggcccctgcagatctcgctagggagaactgtgaaagatatcttcaagttcatggtcattttcatcatggtatttgtggccttcatgattgggatgttcaacctgtactcttactaccgaggtgccaaatacaacccagcgtttacaacggttgaagaaagttttaaaactttgttttggtccatattcggcttatctgaagtaatctcagtggtgctgaaatacgaccacaaattcatcgagaacattggctacgttctctacggcgtttataacgtcaccatggtggtagtgttgctcaacatgctaatagccatgataaacaactcctatcaggaaattgaggaggatgcagatgtggaatggaagttcgcccgagcaaaactctggctgtcttactttgatgaaggaagaactctacctgctccttttaatctagtgccaagtcctaaatcattttattatctcataatgagaatcaagatgtgcctcataaaactctgcaaatctaaggccaaaagctgtgaaaatgaccttgaaatgggcatgctgaattccaaattcaagaagactcgctaccaggctggcatgaggaattctgaaaatctgacagcaaataacactttgagcaagcccaccagataccagaaaatcatgaaacggctcataaaaagatacgtcctgaaagcccaggtggacagagaaaatgacgaagtcaatgaaggcgagctgaaggaaatcaagcaagatatctccagcctgcgctatgagcttcttgaggaaaaatctcaagctactggtgagctggcagacctgattcaacaactcagcgagaagtttggaaagaacttaaacaaagaccacctgagggtgaacaagggcaaagacatttag

SEQ ID NO: 360 - DNA, 363 bp, Homo sapiens
  CDS (1)..(360)
atggccagctggattgccaaacctaccctgcggtcctcgtcttcctggccccatagctcctcctcaccaagcatgtcttccccactgcagagagctgcgggaggtaccaagagggccttgtctgcatcttctagttcctctgccagtctacccttcgatgacagggactcaaaccatccctcagaggctgatgaaggcaatgactttgaagacagcttgaatcacagtgtgaagaagaaagcagcaaaacgaccaccaaaagcaacaccgatggcaaacatccagagaaagggtcccgagtggtacatcgtcatagccggaaacagtcagagccaccagccaatgatcttttcaatgctgtga

SEQ ID NO: 361 - DNA, 462 bp, Homo sapiens
  CDS (1)..(459)
atggcccaaatagctgcacaaggatccaacacttccaccttcagcttgtattacaacaataccagcctttcaagctactccggctggattgccaaacctaccctgcggtcctcgtcttcctggccccatagctcctcctcgccaagcatgtcttccccactgcagagagctgtgggagataccaagagggccttgtctgcatcttctagttcctctgccagtctacccttcgatgacagggactcaaaccatccctcagaggctgatgaaggcagtgactttgaagatagcttcaatcgcaatgtgaagaagaaagcagcaaaacgaccaccgaaaacaacaccggtctcatatcccacctcgctgctcctgcgcctgcagtcccccatgtctgcgacacccagtgtcacagcacccctcattgttaccacctcccatctctctccctcacagctccagtaa

SEQ ID NO: 362 - DNA, 1792 bp, Homo sapiens
  CDS (32)..(1354)
gaattcccgggtcgacgatttcgtccaacccatggccgggtctcctagccgcgccgcgggccggcgactgcagcttcccctgctgtgcctcttcctccagggcgccactgccgtcctctttgctgtctttgtccgctacaaccacaaaaccgacgctgccctctggcaccggagcaaccacagtaacgcggacaatgaattttactttcgctacccaagcttccaggacgtgcatgccatggtcttcgtgggctttgacttcctcatggtcttcctgcagcgttacggcttcagcagcgtgggcttcaccttcctcctggccgcctttgccctgcagtggtccacactggtccagggctttctccactccttccacggtggccacatccatgttggcgtggagagcatgatcaatgctgacttttgtgcgggggccgtgctcatctcctttggtgccgtcctgggcaagaccgggcctacccagctgctgctcatggccctgctggaggtggtgctgtttggcatcaatgagtttgtgctccttcatctcctgggggtgagagatgccggaggctccatgactatccacacctttggtgcctacttcgggctcgtcctttcgcgggttctgtacaggccccagctggagaagagcaagcaccgccagggctccgtctaccattcagacctcttcgccatgattgggaccatcttcctgtggatcttctggcctagcttcaatgctgcactcacagcgctgggggctgggcagcatcggacggccctcaacacatactactccctggctgccagcacccttggcacctttgccttgtcagcccttgtaggggaagatgggaggcttgacatggtccacatccaaaatgcagcgctggctggaggggttgtggtggggacctcaagtgaaatgatgctgacaccctttggggctctggcagctggcttcttggctgggactgtctccacgctggggtacaagttcttcacgcccatccttgaatcaaaattcaaagtccaagacacatgtggagtccacaacctccatgggatgccgggggtcctgggggccctcctgggggtccttgtggctggacttgccacccatgaagcttacggagatggcctggagagtgtgtttccactcatagccgagggccagcgcagtgccacgtcacaggccatgcaccagctcttcgggctgtttgtcacactgatgtttgcctctgtgggcgggggccttggagggctcctgctgaagctaccctttctggactccccccccagactcccagcactacgaggaccaagttcactggcaggtgcctggcgagcatgaggataaagcccagagacctctgagggtggaggaggcagacactcaggcctaacccactgccagcccctgagaggacacgctccttttcgaagatgctgactggctgctactaggaagttctttttgagctcccattcctccagctgcaagaagggagccatgagccagaaggaggcccctttccacaggcagcgtctccacagggagaggggcaacaggaggctgggaaatggtggggagtggggccgtaactgggtacaatagggggaacctcaccagatgcccaacccgactgccctaccagcctgcacatgggtagaagaggccaaattgaggcacccaagtgatccactggccccacgtcacacagttacagtgaagcccaagccaggcctggttgagggtgataaacgcccctgtctctaaaaaaaaaaa

SEQ ID NO: 363 - DNA, 4269 bp, Homo sapiens
  CDS (389)..(2272)
actcactgagccccaggcccaaggataatgatgtgttgtttcttggtagcataatttgtcacacgtacattttttcttcttcttctcttgcagaaagctctgctccctctctctctccctctctctttctctcttttctccctctcctacattttcttgctgttgctaattcatggtgatcaaatgatgtacgacaaaataaattgtaaagagtgactgcctggagttgggaaccagaaggtgttttccccctcccaaggagacagcaaacctttaaaaaggaaggacaattgatttttggggggagcttaagtgagccttgactttgcagctggttgagaacaggttggaggagggtttaaagccaggtgcaccgagtcagctcgccatgtccagatccggggacaggacctccaccttcgaccccagccacagcgacaacctgctgcacggcctcaacctgctgtggaggaagcagctgttttgcgacgtgaccctgacggcccagggccagcagttccattgccacaaggccgtgctggcctcctgctcgcagtacttccgatcgctcttctccagccacccccctctcgggggaggggtcggcggccaggacggcctgggggcccccaaggaccagcagcagccgccgcagcagcagccgtcacagcagcagcagccgccgccgcaggaggagcccgggactccttcttcctcccccgacgacaagctgctgaccagcccccgggccatcaacaacctggtgctgcagggctgctcgtccatcgggctgcgcctggtgctcgagtacctctacacggccaacgtgaccctgtccctggacacggtggaggaggtgctgtcggtcagcaagatcctgcacatcccccaggtcaccaagctctgcgtgcagttcctcaacgaccagatctcggtgcagaactacaagcaggtgtgcaagatcgccgcgctgcacggcctggaggagaccaagaagctggccaacaagtacctggtggaggatgtgctgctgctcaacttcgaggagatgcgcgccctgctggactcgctgccgccccccgtggagtcggagctggcgctcttccagatgtccgtgctgtggctggagcacgaccgcgagacccgcatgcagtatgcgcctgacctcatgaagcgcctccgcttcgccctcatcccggccccggagctggtggagcgggtccagtcagtggatttcatgcgaaccgacccggtctgccagaagctgctgctggacgccatgaactaccacctgatgcccttcaggcagcactgcaggcagagcctggccagcagaattcgctctaacaagaaaatgctgttattggttggagggctgcctcctggaccggaccggctccccagcaatttggttcagtattacgacgatgaaaagaagacatggaaaatactcacaattatgccatacaacagtgcccaccactgcgttgtggaggtggaaaacttcttgttcgtgttgggtggagaggaccagtggaatccgaatggaaaacacagtacaaattttgtcagccgatatgatcctcgatttaatagctggattcaacttccacccatgcaggaaagaagagccagtttctatgcatgtcggttggacaagcatttatacgtaattggtggaaggaatgaaactggctacttgtccagcgtggagtgctataacctagaaacgaatgaatggcgctatgtgtcctctttgccacagcctctggcggctcatgcgggagcagtgcacaatgggaaaatatacatttcagggggtgtacacaatggagaatatgtcccatggctatattgctatgacccagtaatggatgtctgggctcgaaaacaagatatgaacacaaaacgtgcaattcacactttggctgtaatgaatgatcgcttgtatgcaattggaggaaatcatttgaaaggtttctcccaccttgatgtaatgcttgtggaatgctatgacccaaaaggtgaccagtggaatatactccaaactcccattttggagggtcgaagtggccctggctgtgcagtgcttgatgacagcatttaccttgtgggaggctacagctggagtatgggggcctacaagtcatctacaatatgctattgtccagagaaaggaacctggacagaactcgaaggagatgtagcagaaccgttggcaggccctgcctgtgtgacagttattctgccctcttgtgtaccatacaacaaataacaccaggaaactctggaatgaacagtatcacattctaggaagcaatggcaggtgacatcactattataataggaacaatgcattctaatggtacaactgccaaaacccacccttggtttctgatgatttataagtaactacaaaagaaagagacctgttcttgaacagatactatgtctataactcagatcgcaccaaacttcctgtggtgacagactcttccatttcagactggttttaacttatcccagctttacaaaaactcttcatgtgaatcttaacttgcaaaaggagaaagataaaatacagaagactggccccagagagacctcagatcagtattgtgcattgtagtctacctgcatgtgatctatgttgacatttcggggatattgtgttcaagaatgattccaaatttgagccaccaaaatacactgcattacagaaattgccacttgattctgtactcttaacctttggctacttcacagactccattggcaacactgttattgaaaatcatgtaagattaaagagaggcattttcgtttctatacaacttcatttcatacaccttctgcccttacagcacctcatgggatcagaaaagagaaagatgttggctcttgtaataaatgctttctaccctataggttctaggctagacagagtcgtcatttctgtgtcctcaattttatctgaaagattaaaacaaaatatattatgtcactattcagttcatggaggtttgtgctttttcatattttgtgatatataagtagtgaacacacatgttatttacttcaaaagacaggattgacaaattcagtcaatactattttagagattctgttagatgatatgtctgacccaaatttaatccataataaaaaaaaatgggagattgttttcaggaattcagggatgaaaagaaagaataatttccattaagtagaattccagttgtctttctgtttctaaaacacagaacttacaagagccacaggagccaattatagcacctgacagaatacttctcctcttcctcaccttcgggtgcctctagacacttgacttacgatcgttattcccccaattcatcatattttgtttgttatcaccagagatgcctgaactcagttaagcgagcaattgctagttgtcttgaggagcatgaggaattcaggagcagaaggtcaggatagcatgagatagtctcaatgtggccaaccaaaaggacaaaactgacaggaatgcacattcgattttcaagccctccagagcttgaacaacaactttaggagtaaataaaagcctaaaatatattttaaccatccagagatggtgttgaatccttcaacaaatgtgtcattcaaaacagtaattagggaaatcccacagatgaaaaatgccttagtgataagctttcatggcagagcacgtcaagataaatgggtatactggaatccgatgccgtttctacagtaaagtgcaatcttcgttgtttttgtatttatttgtatgttcagatccaaaggatccgttgtaaaaatatatatatataaatatatgtatatccagtgcaatcaactgtcatttctttttccttaaaacatatgagtatatagaaagaaaagttacagtactctgtgggaaaatctcagctgacatcatgaatagaatgaggtctgcttcagaaccttttgttgtcaactgtcactgtttcttccaaaagtcacaatttgtacaagaacctttgctttccttagacttgttctgcattttattttttatttctcaccaaaataaaagcatttatgagaattataagtaaagctttctgtatttcagagagacataagttactagaaagtgaaaagtgaataaataagtcacagagaatgtaaattttgtacagtattagaatgtgtaaatgaagcttgcttggaaggggaaaactttaaataaaaactttatgtactaaaaaaaaaaaa

SEQ ID NO: 364 - DNA, 943 bp, Homo sapiens
  CDS (84)..(494)
aaacacagattagaaatattgtatagcactgacctagaaacctccatttaggtaaaacatcttaacccctttggaagcaaaatatgttaaataacagcataaactcccaccaagaaaatcctcaccttcctcctttcaacacatttattatatacagctgtcactgcattgtcaatctgccaaatggctctatgttccaacagggctggagtagtcccctgctcacaccagccttcacaatacttcccatgtcttccctgttaacctctctccacccagcacccaggctcccaactctcctggctgcctccagccctcagctggcaccactgacatgctgtttccagtacccttttcttctttctgcatcctccctgggggacatacatccctcatctcgtgacttcagctgtcacataaattcaaatgtttcagaactctattttttacctcctacatctgtcagtttaaatgtcaggatattttactttcagtaaagccctaaaaagacaaatctatgtacttttaaagaataaaagaaatgactggctgcagctcaaacctacaactgcttgcgaaactctacaatgtctggcagatgctagaaagaaggggatcaagacagagcacacttggcgtggtatgctatctatagaaaatgttaaaataaaattaagtaatctaggtttcctctctttattttctacatctactctctgaagagggcaataaataaggaaatgtcccaaagagggacaaattaagtcccaaaataacacaaaattgggcaaatccagtcatgaagaaagaacagaggttcttaaattgggacacacagaggcaggtctgcaggtctaggaatctctgaacatatgtgcaaaattctgggtatgtgtgcatatgttatataacaaagcgaagggtccatatagctttcatcact

SEQ ID NO: 365 - DNA, 2574 bp, Homo sapiens
  CDS (130)..(2571)
gcacgaggtggaggacgcggctgcttcaagtccttggctctgatccaggccacagattccaggattctacaggcaggaaacatcttagaaatcagggttgggcaggcaggagccaggagagtagctacaatgacttcaccagtactggtggacatacgagaagaggtgacctgccctatctgcctggagctcctaacagaacccctgagcatagactgtggccacagcttctgccaagcctgcatcacaccaaatggcagggaatcagtgattggtcaagaaggggaaagaagctgccctgtgtgccagaccagctaccagccagggaacctgcggcctaatcggcatctggccaacatagtgaggcggctcagagaggtagtgttgggccctgggaagcagctgaaagcagttctttgtgcagaccatggagaaaaactgcagctcttctgtcaggaggatgggaaggtcatttgctggctttgtgagcggtctcaggagcaccgtggtcaccacacgttcctcgtggaggaggttgcccaggagtaccaggagaagtttcaggagtctctaaagaagctgaagaacgaggagcaggaagctgagaagctaacagcttttatcagagagaagaagacatcctggaagaatcagatggagcctgagagatgcaggatccagacagagtttaatcagctgcgaaatatcctagacagagtggagcaacgggagctgaaaaagctggaacaggaagagaagaaggggctacgaattatagaagaggctgagaatgatctggtccaccagacccagtcgctgcgagagctcatctcggatctggagcgtcgatgtcaggggtcaacaatggagctgctgcaggatgtgagtgatgtcacagaaaggagtgagttctggaccctgaggaagccagaagctctccctacaaagctgagaagtatgttccgagccccagatctgaaaaggatgctgcgagtgtgtagagagctgacagatgtccaaagctactgggccatccaggggtctttaaccagaagagagaggagagcctcaggagttaggaccagaagaagccagggaagcagtgcaatggcttcaaaaatcttgcttaacgtacaagaggaggtgacctgtcccatctgcctggagctgttgacagaacccttgagtctagactgtggccacagcctctgccgagcctgcatcactgtgagcaacaaggaggcagtgaccagcatgggaggaaaaagcagctgtcctgtgtgtggtatcagttactcatttgaacatctacaggctaatcagcatctggccaacatagtggagagactcaaggaggtcaagttgagcccagacaatgggaagaagagagatctctgtgatcatcatggagagaaactcctactcttctgtaaggaggataggaaagtcatttgctggctttgtgagcggtctcaggagcaccgtggtcaccacacagtcctcacggaggaagtattcaaggaatgtcaggagaaactccaggcagtcctcaagaggctgaagaaggaagaggaggaagctgagaagctggaagctgacatcagagaagagaaaacttcctggaagtatcaggtacaaactgagagacaaaggatacaaacagaatttgatcagcttagaagcatcctaaataatgaggagcagagagagctgcaaagattggaagaagaagaaaagaagacgctggataagtttgcagaggctgaggatgagctagttcagcagaagcagttggtgagagagctcatctcagatgtggagtgtcggagtcagtggtcaacaatggagctgctgcaggacatgagtggaatcatgaaatggagtgagatctggaggctgaaaaagccaaaaatggtttccaagaaactgaagactgtattccatgctccagatctgagtaggatgctgcaaatgtttagagaactgacagctgtccggtgctactgggtggatgtcacactgaattcagtcaacctaaatttgaatcttgtcctttcagaagatcagagacaagtgatatctgtgccaatttggccttttcagtgttataattatggtgtcttgggatcccaatatttctcctctgggaaacattactgggaagtggacgtgtccaagaaaactgcctggatcctgggggtatactgtagaacatattcccgccatatgaagtatgttgttagaagatgtgcaaatcgtcaaaatctttacaccaaatacagacctctatttggctactgggttatagggttacagaataaatgtaagtatggtgtctttgaagagtctttgtcctctgatcccgaggttttgactctctccatggctgtgcctccctgccgtgttggggttttcctcgactatgaagcaggcattgtctcatttttcaatgtcacaagccatggctccctcatttacaagttctctaaatgttgcttttctcagcctgtttatccatatttcaatccttggaactgtccagctcccatgactctatgcccaccaagctcttga

SEQ ID NO: 366 - DNA, 1148 bp, Homo sapiens
  CDS (138)..(983)
gaggcggataaaaaggccccaggacgcccggggagggagcccgttagcgctgcgtccgccgtcggacgcccgcccgagccccgtgactgtccgcgctccatctggtatcttggcctcatgctgtccttgaagtcaccatggcgtggtccccaccagccaccctctttctgttcctgctgctgctaggccagccccctcccagcaggccacagtcactgggcaccactaagctccggctggtgggcccagagagcaagccagaggagggccgcctggaggtgctgcaccagggccagtggggcaccgtgtgtgatgacaactttgctatccaggaggccacagtggcttgccgccagctgggcttcgaagctgccttgacctgggcccacagtgccaagtacggccaaggggagggacccatctggctggacaatgtgcgctgtgtgggcacagagagctccttggaccagtgcgggtctaatggctggggagtcagtgactgcagtcactcagaagacgtaggggtgatatgccacccccggcgccatcgtggctacctttctgaaactgtctccaatgcccttgggccccagggccggcggctggaggaggtgcggctcaagcccatccttgccagtgccaagcagcatagcccagtgaccgagggagccgtggacggcgtgcaccctgacggccaactggccggaaagtgtgtgaaccagcgctggcccatgaacaacaagacgggcggcactccggacatgcatgcgcacaccaagcaagggatccaggtagaccagcccacatacacgagaaacacctgtggacctcaccgactcagtgaacccaacgacacggccgacaaccctgccgcccacctacgaccacatcaggagacagccaagacaaccacccgtggcgggacaaagcccgcaactggcacacccccacaggccaaggtggacctaccacaggagcaagattgaccaagacagcaccaggaagaaactcgtgatcacacaggcaagcagaacgcagcgcgaacacaaccacaaccacaccagacgagaacaagcagcagaagcacactacacagcgacgacacacgccacagccgccgcacacacgaagccccacgcaacacgcag

SEQ ID NO: 367 - DNA, 1850 bp, Homo sapiens
  CDS (274)..(1236)
gattacgcctagcttggcacgagggatcacttgactccatcccctccccaccaggactacatctcccagcaggctgtgctctgacagctcttggatttaaataggattctgggctctgctcagagtcaggctgctgctcagcacccaggacggagaggagcagagaagcagcagaagcagccaagagctggagccagaccaggaacctgagccagagctggggttgaagctggagcagcagcaaaagcaacagcagctacagaagttggaacgatgctggtcaccttgggactgctcacctccttcttctcgttcctgtatatggtagctccatccatcaggaagttctttgctggtggagtgtgtagaacaaatgtgcagcttcctggcaaggtagtggtgatcactggcgccaacacgggcattggcaaggagacggccagagagctcgctagccgaggagcccgagtctatattgcctgcagagatgtactgaagggggagtctgctgccagtgaaatccgagtggatacaaagaactcccaggtgctggtgcggaaattggacctatccgacaccaaatctatccgagcctttgctgagggctttctggcaggtgaggtcctgatggaggaaaagcagctccatattctgatcaacaatgcgggagtaatgatgtgtccatattccaagacagctgatggctttgaaacccacctgggagtcaaccacctgggccacttcctcctcacctacctgctcctggagcggctaaaggtgtctgcccctgcacgggtggttaatgtgtcctcggtggctcaccacattggcaagattcccttccacgacctccagagcgagaagcgctacagcaggggttttgcctattgccacagcaagctggccaatgtgctttttactcgtgagctggccaagaggctccaaggcaccggggtcaccacctacgcagtgcacccaggcgtcgtccgctctgagctggtccggcactcctccctgctctgcctgctctggcggctcttctccccctttgtcaagacggcacgggagggggcgcagaccagcctgcactgcgccctggctgagggcctggagcccctgagtggcaagtacttcagtgactgcaagaggacctgggtgtctccaagggcccgaaataacaaaacagctgagcgcctatggaatgtcagctgtgagcttctaggaatccggtgggagtagctggtggaagagctgcagctttatcaggcccaatccatgccataatgaacagggaccaaggagaaggccaaccctaaaggattgtcctcttggccagctggtgctgcgaatcctgcctgctctgatcctcttgacccttctgggaatgtttgcacacctgacactcttgtgagactggcttatggcatgagttgtggacacctatagagtgttcttctctaagacctggaaagtcagcaaccctctgggggcagcaggactgggcagatcccaggctgggcatgggggtggcagaagagcccgagaaattgggtcagttccctcatcagcaccagaggctcagctgaggcaagaagagcaccatcactgcctatttctaggggctatacactccaactcttggttgatctctttctttttaaaaatatttgccaccaccctggagtctagaccaacacacaaagatcctggctaaccctggcctatttagattccttcctctcacctggaccttcccatttcaatcatgcagatggtttctttttgtaaagagttccgtttgcctttcaatttttagagaaaataaagactgcattcaaaaaaaaaaaaaa

SEQ ID NO: 368 - DNA, 953 bp, Homo sapiens
  CDS (162)..(746)
ggcacgagggcggagtctgcggccgttcccgcggcctcctcctcctccccgttcccttcacccccaccccgcacccctttccccatcccggctccgtcaccctcccgtcccccacactcaggacaagaatgccctgcccggaacaacccagcagcgcctagatggctttggtcacggtccagcggtcacctacccccagcaccacctccagcccctgcgcctcggaggcagacagtggggaggaagaatgccggtcacagcccaggagcatcagcgagagctttctaactgtcaaaggtgctgccctttttctaccacggggaaatggctcatccacaccaagaatcagccacagacggaacaagcatgcaggcgatctccaacagcatctccaagcaatgttcattttactccgcccagaagacaacatcaggctggctgtaagactggaaagtacttaccagaatcgaacacgctatatggtagtggtttcaactaatggtagacaagacactgaagaaagcatcgtcctaggaatggatttctcctctaatgacagtagcacttgtaccatgggcttagttttgcctctctggagcgacacgctaattcatttggatggtgatggtgggttcagtgtatcgacggataacagagttcacatattcaaacctgtatctgtgcaggcaatgtgggttgacagggattcaaggaacaaacactgtgatgtactattggtggaagaatgaactggagcagcctttctggagagtgatttgccaatatgccttatcattttgcatgatctttgtcctagtaactctatttctatggatttactctaagtttgtaaacatggatgtgtgcaaagattttagctctaagaatgtttgtcagtgttctaataatagcaaaaaataaaaaacaaatgattgaaaaatagaaaaaaaaaa

SEQ ID NO: 369 - DNA, 1029 bp, Homo sapiens
  CDS (433)..(1026)
cccagcgtcgaggagaaagaatcctgaggcacggcggtgagataaccaaggactcttttttactcttctcacacctttgaagtgggagcctcttgagtcaaatcagtaagaatgcggctcttgcagctgagggtctggggggctgttggggctgcccaaggcagagaggggctgtgacaagccctgcgggatgataactttaaaagggcatctcctgctggcttctcacttggcagctttatcactgcaagtgacagaatggggagggttctgtctctcctgcgtgcttggagagctggggggctataaaaagaggcggcactgggcagctgggagacagggacagacgtaggccaagagaggggaaccagagaggaaccagaggggagagacagagcagcaagcagtggattgctccttgacgacgccagcatgagctccttctccaccaccaccgtgagcttcctccttttactggcattccagctcctaggtcagaccagagctaatcccatgtacaatgccgtgtccaacgcagacctgatggatttcaagaatttgctggaccatttggaagaaaagatgcctttagaagatgaggtcgtgcccccacaagtgctcagtgagccgaatgaagaagcgggggctgctctcagccccctccctgaggtgcctccctggaccggggaagtcagcccagcccagagagatggaggtgccctcgggcggggcccctgggactcctctgatcgatctgccctcctaaaaagcaagctgagggcgctgctcactgcccctcggagcctgcggagatccagctgcttcgggggcaggatggacaggattggagcccagagcggactgggctgtaacagcttccggacccagcagcagtttcacttcttctggttggacatcggggcaatctgtgtgtggggcaacttcctaaacaccaggaagaaacagaatggattccccatccgctgctcctccaggacgcggctgctagcaggaggagatgaattctag

SEQ ID NO: 370 - DNA, 2820 bp, Homo sapiens
  CDS (1)..(2817)
atggtggtgaatgccctggtgtttctttttgtcccttatatcctgggccgcatacttgagaagccaacaacctggaaccaccagtgggctcagacacacgcatgtgcacccaggatggtgccagcagagccccacttgaagcgccaactcccaccgatccccagcaataatgaggcaccctccctgttcccgggtgtccatggaggccacgtggggaacccggacttccactctcatctagcagaagttctcgccgttcagttgctggctgggtccctgctcttctcagccagggccatgccgcaggccagcacagcagccatttcccttttggctcctaccagttttgccccttttcctgatgatatttctcagggcatactttcatcctctactgcacatcaaggcagcccccaggggtggcaaaagctgctgtttttcacagccatccctaataaaaccactgtgatggtcacggtggagccccaggacatgacagtgagatctggggatgacgtggccctgcggtgccaggccactggagagcccacacccaccattgaatggctacaggcgggtcaacccttgcgggccagccggcggctccggaccctgcccgatgggagcctgtggctggagaacgtggagactggggatgcaggcacctacgactgcgtcgctcacaacctcctgggctctgccacagcccgggcgttcctggtctgtgccagccacgccatcgtgggctcccggcatttcagagacccacaggtcttctgtgagtttgtggtcccgcctcctcattttacaggggagccccaggggagctggggcagcatgactggggtgataaatggccggaaatttggcgtggccacactcaacaccagcgtgatgcaggaggcacactccggggtcagcagcatccacagcagcatccgccatgtcccagcaaacgtggggcctctgatgcgggtgctcgtggtcaccatcgcccccatctactgggccctggccagagagagtggggaagccctgaatggccactctctgactgggggcaggttccggcaggagtcacacgtggagtttgctacaggggagctgctcacgatgacccaggtggcccggggtctggatcccgatggcctcctgctcctcgacgtggtggtcaatggcgttgtccccgagagcctggctgacgcagatcttcaagtgcaggactttgaggagcactacgtgcaaacagggcctggccagctgttcgtgggctccacacagcgcttcttccagggcggcctcccctcgttcctacgctgcaaccacagcatccagtacaacgcggcccggggcccccagccccagctggtgcagcacctgcgggcctcagctatcagctcggcctttgatccagaggccgaggccctgcgcttccagctcgctacagccctgcaggcggaggagaacgaggtcggctgccccgagggctttgagctggactcccagggagcgttttgtgtggacagggacgagtgctcaggaggccctagcccctgctcccatgcctgccttaatgcacccggccgcttctcctgcacctgccccactggcttcgccctggcctgggatgacaggaactgcagagatgtggacgagtgtgcgtgggatgctcacctctgccgagagggacagcgctgtgtgaacctgctcgggtcctaccgctgcctccccgactgtgggcctggcttccgggtggctgatggggccggctgtgaagatgtggacgaatgcctggaggggttggacgactgtcactacaaccagctctgcgagaacaccccaggcggtcaccgctgcagctgccccaggggttaccggatgcagggccccagcctgccctgcctagatgtcaatgagtgcctgcagctgcccaaggcctgcgcctaccagtgccacaacctccagggcagctaccgctgcctgtgccccccaggccagaccctccttcgcgacggcaaggcctgcacctcactggagcggaatggacaaaatgtgaccaccgtcagccaccgaggccctctattgccctggctgcggccctgggcctcgatccccggtacctcctaccacgcctgggtctctctccgtccgggtcccatggccctgagcagtgtgggccgggcctggtgccctcctggtttcatcaggcagaacggagtctgcacagaccttgacgagtgccgcgtgaggaacctgtgtcagcacgcctgccgcaacactgagggcagctaccagtgcctgtgccccgccggctaccgtctgctccccagcgggaagaactgccaggacatcaacgagtgcgaggaggagagcatcgagtgtggacccggccagatgtgcttcaacacccgtggcagctaccagtgtgtggacacaccctgtcctgccacctaccggcagggccccagccctgggacgtgcttccggcgctgctcgcaggactgcggcacgggcggcccctctacgctgcagtaccggctgctgccgctgcccctgggcgtgcgcgcccaccacgacgtggcccgcctcaccgccttctccgaggtcggcgtccccgccaaccgcaccgagctcagcatgctggagcccgacccccgcagccccttcgcgctgcgtccgctgcgcgcgggccttggcgcggtctacacccgtcgcgcgctcacccgcgccggcctctaccggctcaccgtgcgtgctgcggcaccgcgccaccaaagcgtcttcgtcttgctcatcgccgtgtccccctacccctactaa

SEQ ID NO: 371 - DNA, 588 bp, Homo sapiens
  CDS (147)..(413)
ctcccagaaggattttccctggatgatccactaacacaccctttccgagatgttttctcaagggcctccattgtcttcagcatcctctcatctctttcctgtcccttttcccagctgttgtcacttctccctcccaaagctcccagatgcctgagcccttcggaacctcgtgcaccctggactggtggctggcccaggcctcggtagggggccaggttttcatcctgaacatcctcttcttctgcctcttgctcccaacggctgtgatcgtgttctcctacgtaaagatcattgccaaggttaagtcctcttccaaagaagtagctcatttcgacagtcggatccatagcagccatgtgctggaaatgaaactgacaaaggtaagtgcactaatattttacacatgtgttttctgactacttacaacttcatagggtacaaaggatagggaacgttggagactgagagaacttagaatctctattctttacgtaattctgaacttcgttgatgattgtctaagcctttctttgtggtatctctctcctctttctgtctctgtacccccacttctctcttctctctctc

SEQ ID NO: 372 - DNA, 1089 bp, Homo sapiens
  CDS (552)..(842)
attttcgggtcgacgttccgtgcgaggcttgagctgacactgcgggaagcagaggcatctgccgtgcacagagcctggcgagcatattccaggcttgaggaggggtcctaaggcagggagaagttggcgagtgggcagggctgtgctttgagggctgacattggacatggggtttcactgggcccaaatcctatggcgctttacaggccccagtgaggaactttgttcctagggcagtgcggagccaccaaaggctttgagtgggagaggggcctgatctgaatagtgacattgaaagctctatctggcttcggggccacaggggattgaatggggtctggagggcagatcagcagagagggtgggggtggctcagaatcacagtcacctgtcctgaatgtccatgtccatgctggatgtcccctgcccaacacccacccaggctgggctgtggggtcagcacctggccgggccaggaggtggcctgtgagtgaccacccccggggaggtggacgagtccctaatgtttccctcgctccccaccagggcccatgtgtgacctgctctggtcagatccacagccacagaacgggcgctcgatcagcaagcggggcgtgagctgtcagtttgggcctgacgtcaccaaggccttcttggaagagaacaacctggactatatcatccgcagccacgaagtcaaggccgagggctacgaggtggctcacggaggccgctgtgtcaccgtcttctctgcccccaactactggtatgtctttgcctttccagcccagggcctctaccaagccacgggtttttgtcttggtttttgttttgcctttttatgatggaacatttcaaagacaggcaagagcagataaaagaacatgatgaacacccccgtatgtgtcacccacccatgcagcaccagtggggccagcctgtgagcgctgaccagctgccctgtgttacagcaagcccctggcacttcacctttctcccactgattgcccagcacttttcagaaggaaagggatctttttcttaaccacaatatcgtgtttacacttttgagtgctggctgggcatggg

SEQ ID NO: 373 - DNA, 2980 bp, Homo sapiens
  CDS (830)..(1846)
gggccgtggtgcagcgcgtcacccgggccagcgtcacagttggaggagagcagattagtgccattggaaggggcatatgtgtgttgctgggtatttccctggaggatacgcagaaggaactggaacacatggtccgaaagattctaaacctgcgtgtatttgaggatgagagtgggaagcactggtcgaagagtgtgatggacaaacagtacgagattctgtgtgtcagccagtttaccctccagtgtgtcctgaagggaaacaagcctgatttccacctagcaatgcccacggagcaggcagagggcttctacaacagcttcctggagcagctgcgtaaaacatacaggccggagcttatcaaagatggcaagtttggggcctacatgcaggtgcacattcagaatgatgggcctgtgaccatagagctggaatcgccagctcccggcactgctacctctgacccaaagcagctgtcaaagctcgaaaaacagcagcagaggaaagaaaagaccagagctaagggaccttctgaatcaagcaaggaaagaaacactccccgaaaagaagaccgcagtgccagcagcggggctgagggcgacgtgtcctctgaacgggagccgtagctcaggaggcagaattcagtgtgttatcattgggcagaactggatcctgaaaaattcaagatgctaagcacctacactactttaagaatttggaactgaaacatgaagaggaagacagaaataagaatttgggaacctgaatagctctgcaaaaaacaccaaaggaccgttttatcgttttctgttgttgctgtggtggagtgatgcagtgggcactgccggtgggccagggggcgggtgcgcatgtggtagaaggtgtgcgctcgtgcctcccccacagaaaggctttgttggtttctaccacatcttggcttgcttttggaacaggctggcccagcatcatttgtcatcaagtccactgtggtgtattctgcgtgtccatggcgggggttctccaatacactcacactgtccatgttctttttattgccagggcccgtgttgaagtgtcaagagagcaatcatcaatgataatgtattgtgtgagacctttgcatcttgtaaattttctcttttttctaaaaataaataataataaaatccggaagatggcggcggccgttccacagcgggcgtggaccgtggagcagctgcgcagtgagcagctgcccaagaaggacattatcaagtttctgcaggaacacggttcagattcgtttcttgcagaacataaattattaggaaacattaaaaatgtggccaagacagctaacaaggaccacttggttacagcctataaccatctttttgaaactaagcgttttaagggtactgaaagtataagtaaagtgtctgagcaagtaaaaaatgtgaagcttaatgaagataaacccaaagaaaccaagtctgaagagaccctggatgagggtccaccaaaatatactaaatctgttctgaaaaagggagataaaaccaactttcccaaaaagggagatgttgttcactgctggtatacaggaacactacaagatgggactgtttttgatactaatattcaaacaagtgcaaagaagaagaaaaatgccaagcctttaagttttaaggtcggagtaggcaaagttatcagaggatgggatgaagctctcttgactatgagtaaaggagaaaaggctcgactggagattgaaccagaatgggcttacggaaagaaaggacagcctgatgccaaaattccaccaaatgcaaaactcacttttgaagtggaattagtggatattgattgaaataggcagtgcttcagctctaaggatattagcaacaatgataaaacttggccttgaagaaatttacacaactagttagaacttgttactattgtaaaggaagagtcaactggaaaattcaaggagttaataaaatttgtttacttggtcccagcttttgagagataaatcccttatgaatccctggtctaaaatactttcctacagctgtgtaaaatactggtcaaggagaactttttccttttacctcatgttgtaaacttaagaaaagacggggtgtggcgggggtaggtgggcgaggaacctgggatgcaaaccagtgtttggggccaggagtggctgtatggtttcagaggcgcccaccactctgggtttgagggacacagcaccctcgtctcggcgctttggattgtcacgcaccagaccacggggcggaggaatggagtggcatccctggggggagttaagacacacgaggtttgcagtttcattttgtttcagaatcagtttggccataaaaatggactgggttggggacaggcggagcgattgaaccaccggagatgaggaggaggtggcaggcgcctctcctggggtggggactgagggctgtggagacagtaccatggtgaaggaccccatggcaatgggagtattgcactgagccaggtttcgggggaacggggacgtgtcgggatggcgtagggggacagagcctggcaggagacacatggaagtttccgccttgtcagtctcagagcaaacgccttttagtctttacagtacaggaatttggacactgcccacgttctcagtggacagcagccatcagaggtgacccaggagggaagtgggcattggtcaccaaggtatttacagacttctatcatgggggacagcggggtgggtccagcagcctccctcgcgggggatctgagggagaccgagttcgctaaatattataaataggtcttgccgtcctcctgcccccgcccctcggcacagtcagtggagcacgtcagcctcggtttacagttctctgaaaaggaaccaaaaaacacaaccaacaccaagtatatctccaaaggggccttggagacaacacaagaatggaaatgaaatgctcgtgcc

SEQ ID NO: 374 - DNA, 1692 bp, Homo sapiens
  CDS (1)..(1689)
atggcgctgcgcgcccgggcgctgtacgacttcaggtcggagaacccaggagagatctcgctgcgagagcacgaggtgctgagcctgtgcagcgagcaggacatcgagggctggctcgagggggtcaacagccgcggcgaccgcggcctcttcccggcctcctatgtgcaggtgatccgcgcccccgagcctggcccggcgggagacggcggcccgggcgccccggcccgctacgccaatgtgccccccgggggcttcgagcccctgcccgtcgcgccccccgcctccttcaagccgccgcctgacgccttccaggcgctgctgcagccacagcaggcgccgcctccgagcaccttccagccgcccggcgcgggcttcccgtacggcgggggcgccctgcagccgtcgcctcagcagctctacggcggctaccaggccagccaaggcagcgatgatgactgggacgacgagtgggacgacagctccacggtggcggacgagccgggcgctctgggcagcggagcatacccggacctcgacggctcgtcttcggcgggtgtgggcgcagccggccgctaccgcctgtccacgcgctccgacctgtccctgggctcccgcggcggctcggtccccccgcagcaccacccgtcggggcccaagagctcggccaccgtgagccgcaacctcaatcgcttctccaccttcgtcaagtccggcggggaggccttcgtgctgggggaggcgtcaggcttcgtgaaggacggggacaagctgtgcgtggtgctggggccctatggccccgagtggcaggagaacccctacccgttccagtgcaccatcgacgaccccaccaagcagaccaagttcaagggcatgaagagctacatctcctacaagctggtgcccacgcacacgcaggtgccggtgcatcggcgctacaagcacttcgactggctgtacgcgcgcctggcggagaagttcccggtcatctccgtgccccacctgcccgagaagcaggccaccggccgcttcgaggaggacttcatctctaagcgcaggaagggcctgatctggtggatgaaccacatggccagccacccagtgctggcgcagtgcgacgtcttccagcacttcctgacgtgccccagcagcaccgacgagaaagcctggaagcagggcaagaggaaggccgagaaggacgagatggtgggcgccaacttcttcctgacccttagcacgccccccgccgctgcccttgacctgcaggaggtggagagcaagatagacggcttcaagtgcttcaccaagaagatggacgacagcgcgctgcagctcaaccacacggccaacgagttcgcgcgcaagcaggtgaccggcttcaaaaaggagtatcagaaggtgggccagtccttccgcggcctcagccaggcctttgagctggaccagcaggccttctcggtgggcctgaaccaggctatcgccttcaccggagatgcctatgacgccattggcgagctcttcgcggagcagcccaggcaggacctggatcccgtcatggacctattagcgctgtatcaggggcatctggctaacttcccggacatcatccacgttcagaaagcgggtctggcctttactggtgaagtgctcactgcctttctggtgggccagtccgtttatgagcaaccctga

SEQ ID NO: 375 - DNA, 1958 bp, Homo sapiens
  CDS (180)..(923)
gagcctgagccctgcggaacctcggcgctcggccccaccccgcccgtacctgcacttatttattgttgttatttcttaccgcggagccccgcagtcgggtcctcccgcccgctcccgcgcagcgctagcattctccagtccctcagtcccttcccgcgcggtgcgccgcagccgaggcgatgcgcctcattcagaacatgtgcaccatcgccgagtaccccgcgccgggcaacgccgcggcctccgactgctgtgtgggcgccgccggccgccgcctggtcaagatcgccgtggtgggcgccagcggcgtgggcaagaccgcactggtggtccggttcctcaccaaacgattcatcggtgactatgaaagaaatgcaggtaatctctatactagacaagttcagatagaaggtgaaaccctggctcttcaggttcaagacactccaggtattcaggtccatgagaacagcctgagctgcagtgaacagctgaataggtgcattcgctgggcagatgctgtggtgatcgttttctccatcactgactacaagagctatgaactcatcagccagctccaccagcacgtgcagcagctacacctgggcacccggctgcctgtggtggtcgtggccaacaaagctgacctgttgcacatcaaacaggttgaccctcagcttggactgcagctagccagcatgctaggctgctcattctatgaagtgtctgtcagtgaaaattataatgatgtctacagcgccttccacgtcctctgtaaagaggtcagtcacaaacagcagcctagcagtacacccgagaagcgaagaacctccctcattcccaggcccaagtcacccaacatgcaggacctgaagaggaggtttaagcaagccctctctgccaaagtgaggactgtcacctccgtctgaagcaggaggagcactcaagggggtttggtcttcccaggaagagggcctgaggttctcctagtgcaggaacgttgaatattggcaatgattcctggttccagaaagggctggagcagaagggccaagagggcctgtggaactgctacagaaaaggaagtgttgttctgagcagggggacaggattgatgaggcttgaaagagcccactgagccactctctgaatatgtgaaatgtactctgtgtcttttcctttagagtggggagggggcataatcgtttcggtttctgcattcaactaccttgtaaatggtggtccgttgcagtttcaccaaatgtattgatgtgatttacagtgggaatgaaagaacagattaagcattgataggctttcttttttcccccttttttcttttttctcttttcttctttcttttcctctttttccccaagaggaagaattgcttttctcttaccagtatgatttgtaactctggaacactattcttacagaatgcctttctaacctgaaggatacccagatttctttctttatgtacaagatggaaaatcccctacccctcaaaaacaggttgagtttatgggccagaatattctgtataccagacattggtaagctctcatggtttacaggaaggctctggttccccctcacaggatgagcatgctcagttgggcgtgtgtggaggagctgtgaacttcacgctcttcaaccccagactttgactgtatagttttttgtttttttaactgttccatcaggaaaaaaatgtgtcagttgattttggtgtgacttgtgtaaatggttcatggcaatgacgttgggttgcttcctaggcctggctgagttgtgcctaagggtggctgaaatactaaaacactatcttacagcaagtgaacaggggctacctgccacatcccctccacagatgcactttaaaaagccactcaagctttggcttaaactgtaattaatttattttatgtacaataaatcgcatttgaaaaaaaaaa

SEQ ID NO: 376 - DNA, 4836 bp, Homo sapiens
  CDS (290)..(3883)
cggcgcctcggcctcggccgctccgcccgcccggccgccccgagccccgagccccgagccccccgcgccgggcccgggcggcagcggcggcggcggcggcggcggcgcgcccggccccctcccccggcgccggccacgggaggcggtgatgcgggcgcgggcggcctcggctgcgccgagagcggagacacaggctcaagatggcagattccgactgaggctgggggggccgagctcgcgcgccgctttcccgtccccgttgccatgaaccgcggacaccccggccccgatggcccccgtgtacgaaggtatggcctcacatgtgcaagttttctcccctcacacccttcaatcaagtgccttctgtagtgtgaagaaactgaaaatagagccgagttccaactgggacatgactgggtacggctcccacagcaaagtgtatagccagagcaagaacatccccctgtcgcagccagccaccacaaccgtcagcacctccttgccggtcccaaacccaagcctaccttacgagcagaccatcgtcttcccaggaagcaccgggcacatcgtggtcacctcagcaagcagcacttctgtcaccgggcaagtcctcggcggaccacacaacctaatgcgtcgaagcactgtgagcctccttgatacctaccaaaaatgtggactcaagcgtaagagcgaggagatcgagaacacaagcagcgtgcagatcatcgaggagcatccacccatgattcagaataatgcaagcggggccactgtcgccactgccaccacgtctactgccacctccaaaaacagcggctccaacagcgagggcgactatcagctggtgcagcatgaggtgctgtgctccatgaccaacacctacgaggtcttagagttcttgggccgagggacgtttgggcaagtggtcaagtgctggaaacggggcaccaatgagatcgtagccatcaagatcctgaagaaccacccatcctatgcccgacaaggtcagattgaagtgagcatcctggcccggttgagcacggagagtgccgatgactataacttcgtccgggcctacgaatgcttccagcacaagaaccacacgtgcttggtcttcgagatgttggagcagaacctctatgactttctgaagcaaaacaagtttagccccttgcccctcaaatacattcgcccagttctccagcaggtagccacagccctgatgaaactcaaaagcctaggtcttatccacgctgacctcaaaccagaaaacatcatgctggtggatccatctagacaaccatacagagtcaaggtcatcgactttggttcagccagccacgtctccaaggctgtgtgctccacctacttgcagtccagatattacagggcccctgagatcatccttggtttaccattttgtgaggcaattgacatgtggtccctgggctgtgttattgcagaattgttcctgggttggccgttatatccaggagcttcggagtatgatcagattcggtatatttcacaaacacagggtttgcctgctgaatatttattaagcgccgggacaaagacaactaggtttttcaaccgtgacacggactcaccatatcctttgtggagactgaagacaccagatgaccatgaagcagagacagggattaagtcaaaagaagcaagaaagtacattttcaactgtttagatgatatggcccaggtgaacatgacgacagatttggaagggagcgacatgttggtagaaaaggctgaccggcgggagttcattgacctgttgaagaagatgctgaccattgatgctgacaagagaatcactccaatcgaaaccctgaaccatccctttgtcaccatgacacacttactcgattttccccacagcacacacgtcaaatcatgtttccagaacatggagatctgcaagcgtcgggtgaatatgtatgacacggtgaaccagagcaaaacccctttcatcacgcacgtggcccccagcacgtccaccaacctgaccatgacctttaacaaccagctgaccactgtccacaaccaggctccctcctctaccagtgccactatttccttagccaatcccgaagtctccatactaaactacccatctacactctaccagccctcagcggcatccatggctgcagtggcccagcggagcatgcccctgcagacaggaacagcccagatttgtgcccggcctgacccgttccagcaagctctcatcgtgtgtccccccggcttccaaggcttgcaggcctctccctctaagcacgctggctactcggtgcgaatggaaaatgcagttcccatcgtcactcaagccccaggagctcagcctcttcagatccaaccaggtctgcttgcccagcaggcttggccaagtgggacccagcagatcctgcttcccccagcatggcagcaactgactggagtggccacccacacatcagtgcagcatgccaccgtgattcccgagaccatggcaggcacccagcagctggcggactggagaaatacgcatgctcacggaagccattataaccccatcatgcagcagcctgcactattgaccggtcatgtgacccttccagcagcacagcccttaaatgtgggtgtggcccacgtgatgcggcagcagccaaccagcaccacctcctcccggaagagtaagcagcaccagtcatctgtgagaaatgtctccacctgtgaggtgtcctcctctcaggccatcagctccccacagcgatccaagcgtgtcaaggagaacacacctccccgctgtgccatggtgcacagtagcccggcctgcagcacctcggtcacctgtgggtggggcgacgtggcctccagcaccacccgggaacggcagcggcagacaattgtcattcccgacactcccagccccacggtcagcgtcatcaccatcagcagtgacacggacgaggaggaggaacagaaacacgcccccaccagcactgtctccaagcaaagaaaaaacgtcatcagctgtgtcacagtccacgactccccctactccgactcctccagcaacaccagcccctactccgtgcagcagcgtgctgggcacaacaatgccaatgcctttgacaccaaggggagcctggagaatcactgcacggggaacccccgaaccatcatcgtgccacccctgaaaacccaggccagcgaagtattggtggagtgtgatagcctggtgccagtcaacaccagtcaccactcgtcctcctacaagtccaagtcctccagcaacgtgacctccaccagcggtcactcttcagggagctcatctggagccatcacctaccggcagcagcggccgggcccccacttccagcagcagcagccactcaatctcagccaggctcagcagcacatcaccacggaccgcactgggagccaccgaaggcagcaggcctacatcactcccaccatggcccaggctccgtactccttcccgcacaacagccccagccacggcactgtgcacccgcatctggctgcagccgctgccgctgcccacctccccacccagccccacctctacacctacactgcgccggcggccctgggctccaccggcaccgtggcccacctggtggcctcgcaaggctctgcgcgccacaccgtgcagcacactgcctacccagccagcatcgtccaccaggtccccgtgagcatgggcccccgggtcctgccctcgcccaccatccacccgagtcagtatccagcccaatttgcccaccagacctacatcagcgcctcgccagcctccaccgtctacactggatacccactgagccccgccaaggtcaaccagtacccttacatataaacactggaggggagggagggagggagggagggagagaatggcccgagggaggagggagagaaggagggaggcgctcctgggaccgtgggcgctggccttttatactgaagatgccgcaaacaaacaatgcaaacggggcaggggcgggggggggggggcagagggcagggggacgggtcgggacaccagtgaaacttgaaccgggaagtgggaggacgtagagcagagaagagaacatttttaaaaggaagggattaaagagggtgggaaatctatggtttttattttaaaaaaagaaaaaggaaaaaaaaaaagtcaataacaaaaaacccagctcaagaacccattctacgccaaactggaaaggaaaaaagagcaacaggaagattccaaaaacggggggccccagtttttgaagaactttatgaacttttcaaagattattttcatatggcagcaagtgatacggaaaactgctgtcagggacacctgatatggaaatcaaatagatttttaattaattgaacataagatttagggatttttccagaactcgaaagggtcaacagccctccagaatgtcgggctgcagcctgaggaggctgatgtttggagctggtgtgggattggcgaagcccagtccgggctccctagtcaggaaagacgggggacggcaggctgctggaaggccccgggggcgcggggcgagtttacttttactgagcacctctggataaatccctaagcaacgtggtttctcaaatgtcattaataatgttgtgttgcaaacttagggtcacatccctctctgaaaatgtatttctccttgggaatccacccctagtacgcgtagcgtagggctagggtcgtcaacagaacaccctagtagaatgtacgcactacagcaccttgtttcctacattgtgttcaactccaagatccaataggat

SEQ ID NO: 377 - DNA, 4755 bp, Homo sapiens
  CDS (290)..(3802)
cggcgcctcggcctcggccgctccgcccgcccggccgccccgagccccgagccccgagccccccgcgccgggcccgggcggcagcggcggcggcggcggcggcggcgcgcccggccccctcccccggcgccggccacgggaggcggtgatgcgggcgcgggcggcctcggctgcgccgagagcggagacacaggctcaagatggcagattccgactgaggctgggggggccgagctcgcgcgccgctttcccgtccccgttgccatgaaccgcggacaccccggccccgatggcccccgtgtacgaaggtatggcctcacatgtgcaagttttctcccctcacacccttcaatcaagtgccttctgtagtgtgaagaaactgaaaatagagccgagttccaactgggacatgactgggtacggctcccacagcaaagtgtatagccagagcaagaacatccccctgtcgcagccagccaccacaaccgtcagcacctccttgccggtcccaaacccaagcctaccttacgagcagaccatcgtcttcccaggaagcaccgggcacatcgtggtcacctcagcaagcagcacttctgtcaccgggcaagtcctcggcggaccacacaacctaatgcgtcgaagcactgtgagcctccttgatacctaccaaaaatgtggactcaagcgtaagagcgaggagatcgagaacacaagcagcgtgcagatcatcgaggagcatccacccatgattcagaataatgcaagcggggccactgtcgccactgccaccacgtctactgccacctccaaaaacagcggctccaacagcgagggcgactatcagctggtgcagcatgaggtgctgtgctccatgaccaacacctacgaggtcttagagttcttgggccgagggacgtttgggcaagtggtcaagtgctggaaacggggcaccaatgagatcgtagccatcaagatcctgaagaaccacccatcctatgcccgacaaggtcagattgaagtgagcatcctggcccggttgagcacggagagtgccgatgactataacttcgtccgggcctacgaatgcttccagcacaagaaccacacgtgcttggtcttcgagatgttggagcagaacctctatgactttctgaagcaaaacaagtttagccccttgcccctcaaatacattcgcccagttctccagcaggtagccacagccctgatgaaactcaaaagcctaggtcttatccacgctgacctcaaaccagaaaacatcatgctggtggatccatctagacaaccatacagagtcaaggtcatcgactttggttcagccagccacgtctccaaggctgtgtgctccacctacttgcagtccagatattacagggcccctgagatcatccttggtttaccattttgtgaggcaattgacatgtggtccctgggctgtgttattgcagaattgttcctgggttggccgttatatccaggagcttcggagtatgatcagattcggtatatttcacaaacacagggtttgcctgctgaatatttattaagcgccgggacaaagacaactaggtttttcaaccgtgacacggactcaccatatcctttgtggagactgaagacaccagatgaccatgaagcagagacagggattaagtcaaaagaagcaagaaagtacattttcaactgtttagatgatatggcccaggtgaacatgacgacagatttggaagggagcgacatgttggtagaaaaggctgaccggcgggagttcattgacctgttgaagaagatgctgaccattgatgctgacaagagaatcactccaatcgaaaccctgaaccatccctttgtcaccatgacacacttactcgattttccccacagcacacacgtcaaatcatgtttccagaacatggagatctgcaagcgtcgggtgaatatgtatgacacggtgaaccagagcaaaacccctttcatcacgcacgtggcccccagcacgtccaccaacctgaccatgacctttaacaaccagctgaccactgtccacaaccagccctcagcggcatccatggctgcagtggcccagcggagcatgcccctgcagacaggaacagcccagatttgtgcccggcctgacccgttccagcaagctctcatcgtgtgtccccccggcttccaaggcttgcaggcctctccctctaagcacgctggctactcggtgcgaatggaaaatgcagttcccatcgtcactcaagccccaggagctcagcctcttcagatccaaccaggtctgcttgcccagcaggcttggccaagtgggacccagcagatcctgcttcccccagcatggcagcaactgactggagtggccacccacacatcagtgcagcatgccaccgtgattcccgagaccatggcaggcacccagcagctggcggactggagaaatacgcatgctcacggaagccattataaccccatcatgcagcagcctgcactattgaccggtcatgtgacccttccagcagcacagcccttaaatgtgggtgtggcccacgtgatgcggcagcagccaaccagcaccacctcctcccggaagagtaagcagcaccagtcatctgtgagaaatgtctccacctgtgaggtgtcctcctctcaggccatcagctccccacagcgatccaagcgtgtcaaggagaacacacctccccgctgtgccatggtgcacagtagcccggcctgcagcacctcggtcacctgtgggtggggcgacgtggcctccagcaccacccgggaacggcagcggcagacaattgtcattcccgacactcccagccccacggtcagcgtcatcaccatcagcagtgacacggacgaggaggaggaacagaaacacgcccccaccagcactgtctccaagcaaagaaaaaacgtcatcagctgtgtcacagtccacgactccccctactccgactcctccagcaacaccagcccctactccgtgcagcagcgtgctgggcacaacaatgccaatgcctttgacaccaaggggagcctggagaatcactgcacggggaacccccgaaccatcatcgtgccacccctgaaaacccaggccagcgaagtattggtggagtgtgatagcctggtgccagtcaacaccagtcaccactcgtcctcctacaagtccaagtcctccagcaacgtgacctccaccagcggtcactcttcagggagctcatctggagccatcacctaccggcagcagcggccgggcccccacttccagcagcagcagccactcaatctcagccaggctcagcagcacatcaccacggaccgcactgggagccaccgaaggcagcaggcctacatcactcccaccatggcccaggctccgtactccttcccgcacaacagccccagccacggcactgtgcacccgcatctggctgcagccgctgccgctgcccacctccccacccagccccacctctacacctacactgcgccggcggccctgggctccaccggcaccgtggcccacctggtggcctcgcaaggctctgcgcgccacaccgtgcagcacactgcctacccagccagcatcgtccaccaggtccccgtgagcatgggcccccgggtcctgccctcgcccaccatccacccgagtcagtatccagcccaatttgcccaccagacctacatcagcgcctcgccagcctccaccgtctacactggatacccactgagccccgccaaggtcaaccagtacccttacatataaacactggaggggagggagggagggagggagggagagaatggcccgagggaggagggagagaaggagggaggcgctcctgggaccgtgggcgctggccttttatactgaagatgccgcaaacaaacaatgcaaacggggcaggggcgggggggggggggcagagggcagggggacgggtcgggacaccagtgaaacttgaaccgggaagtgggaggacgtagagcagagaagagaacatttttaaaaggaagggattaaagagggtgggaaatctatggtttttattttaaaaaaagaaaaaggaaaaaaaaaaagtcaataacaaaaaacccagctcaagaacccattctacgccaaactggaaaggaaaaaagagcaacaggaagattccaaaaacggggggccccagtttttgaagaactttatgaacttttcaaagattattttcatatggcagcaagtgatacggaaaactgctgtcagggacacctgatatggaaatcaaatagatttttaattaattgaacataagatttagggatttttccagaactcgaaagggtcaacagccctccagaatgtcgggctgcagcctgaggaggctgatgtttggagctggtgtgggattggcgaagcccagtccgggctccctagtcaggaaagacgggggacggcaggctgctggaaggccccgggggcgcggggcgagtttacttttactgagcacctctggataaatccctaagcaacgtggtttctcaaatgtcattaataatgttgtgttgcaaacttagggtcacatccctctctgaaaatgtatttctccttgggaatccacccctagtacgcgtagcgtagggctagggtcgtcaacagaacaccctagtagaatgtacgcactacagcaccttgtttcctacattgtgttcaactccaagatccaataggat

SEQ ID NO: 378 - DNA, 4449 bp, Homo sapiens
  CDS (383)..(2548)
tttcgtcagagcagcaggcggcatccggggggagcggggccggctggggggccccaggagggcttcctggaaccccagctccatggccgcctgcaccctgacacaggccagataagagtcccggctgcattatcagagcccggcagggcaccggcctccctgcaccagaaggaagactcggggcgcagcaggtcctcaaggcgatcttcccagagagcgggaccagcggctggtggccagtgtggatggaatttgcagagccctagctcgagtccgggagtcccgggccagatgggagcagacgcttgctggcggcaatagggaaagtgaggcagctgcaaggagggcggcgggactgcactcgagtgtccagacctgctcgatggtgaccaccatgtcggtgaggttgcggttcctgtcccctggggacacaggggccgtgggggtcgtgggccggagcgcctccttcgcaggcttcagcagtgcacagagccggaggatcgcaaagtccatcaacaggaactccgtgagatcgcgaatgcctgcaaaatcctccaagatgtacggcacgctgcggaaggggtcggtctgtgcagacccgaagccccagcaggtgaagaagatcttcgaagcattgaaaagaggcctcaaggagtatctgtgtgtgcagcaggctgagctggaccacctgtctggacgccacaaagacaccaggaggaattccaggctggctttctattatgacctggacaagcaaacgcgctgtgtggaaaggcacattcggaagatggagtttcacatcagcaaggtggatgagctgtacgaggactactgcatccagtgccgcctgcgcgacggcgcctccagcatgcagcgggccttcgcccggtgccccccgagccgcgcagcccgagagagcctgcaggagctgggccgcagcctgcacgagtgcgccgaggacatgtggctcatcgagggggccctggaggttcacctgggcgagttccacatcaggatgaaaggcttggtgggctacgcacgcctctgtcccggagaccactatgaggtgctcatgcgtctgggccgccagcgttggaagctcaagggtcggatcgagtcagatgacagccagacctgggacgaagaggagaaggccttcatccccacgctgcatgagaacctggacatcaaggtgacggagttgcggggcctgggctcgctggctgtgggtgcagtgacgtgtgacatcgccgacttcttcacgacgcggccgcaggtcatcgtggtggacatcacggagttgggtaccatcaagctgcagctggaggtgcagtggaacccgtttgatactgagagcttcctggtgtcacccagccccacgggcaagttttctatgggcagcaggaagggctccttgtacaactggacacccccgagcacccccagcttccgggagagatactacctgtctgtcctacagcagccaacacagcaggccttgctgctgggtggcccaagggccacctccatcctcagctacctgtctgacagcgacctccggggtcccagcctaagaagccagagtcaggagctgcctgagatggactccttcagctctgaggacccccgagacacggagaccagcacgtcggcgtccacctcagatgtgggcttcctgcccttgaccttcggtccccacgcctccattgaagaggaggctcgggaggaccccctgcccccaggtctcctgccagagatggcccacctctctggaggcccgtttgcagagcagcctggctggaggaacttaggaggggagagccccagcctgccacagggctccctgttccacagcggcacagcctcgagtagccagaacggccacgaggaaggggcaaccggggacagagaggacgggcctggcgtggccctcgaggggcctctgcaggaggtcctggagttgctgaggcccacggactccacccagccccagctccgggagctggagtaccaggtcctcggcttccgggaccggctgaagccctgcagagcacggcaggagcacacctcggccgagagcctgatggagtgcatcctggagagcttcgccttcctcaatgccgacttcgccctggatgagctgtccctgtttgggggctcccagggtctccgaaaggaccggcccctgcccccaccgtcatcactgaaagcgtcatccagggaactcacagccggtgccccagagctggacgtgctgctgatggtacacctccaagtctgcaaagctctgctgcagaaactggcctcccctaatttatcaaggctggtccaggaatgcctcctggaagaagtggcacagcaaaagcacgttctggagacactttctgtccttgactttgagaaggtcggcaaggcaacatccattgaagagagtcctagtggagggaaacctttcgggtccttgtcatgtgctctccccgagtcaccattcaggtttctgaactggggctttcagtcatcccacaggcctcgcggacgaaggggtgcctgaagctgtggagagggtgcacagggcctggcagggtcctgtcctgccctgccacgacgctgctgaaccagctcaagaaaaccttccagcacagagtcagagggaagtacccaggacagctggaaatagcgtgccgcaggctcctggagcaggtggtcagctgtggtgggctgctccccggagctgggctcccagaagaacagatcattacctggttccagtttcacagctacctgcagaggcagagcgtctctgacctggagaagcacttcacccagctcaccaaggaagtgacactcatcgaggagcttcactgtgcgggacaggccaaggtggtccggaagctgcaggggaagcggctgggccagctccagcctctgccccagaccttaagagcctgggcgctgctccagctggacggcactccgagggtgtgcagggcggccagcgctcgcctggctggtgcagtcaggaacagaagcttccgggaaaaggctttgctgttctacaccaacgccctggcagagaacgacgcaaggctccagcaggccgcatgcctagcgctcaaacacctcaagggcattgaaagcatcgaccagactgccagcctgtgccagtctgacctggaggccgtgcgggcggcagcccgggaaaccacactgtcgttcggtgaaaaaggacggttagcttttgagaagatggacaagctctgctcagaacaaagagaagtcttttgccaggaggcagatgttgaaatcacaatattttaaaaaatcctggctgatgagcacaaatctcacatcgttttttttgctgctgcccagcctggacatagcctgcactctgggtaatggtgctgtgcactcctccaggagtgtgagctgcccagagctctacctgagactccggccattgacccagccccagggcatgggctggtcttttgtacagaggcagaaaaaagcaaggcaaaggtacagcattccaggggctgcacggcctcaacagagcgctcaacttctggctgagggtctgtgtgaccttccccgagatgcagagctgagccaaactaggtggccacctacaaaagggccaaggccaggcaagttgaggccctaaataaaaggctccaaggcaagtgtgtagaactccaggcctcgctgccggtcagctgctcggcacttctgcgtcaagaggcactggggatgcagcaggctggcaggtggctggccctgctaatgcaagactgctcaggccatttcagcagcagccaggtgtcaccttggtgagctggggaaggtgggaaggcacaaagccagggtttctacaaccacactctcagcccgactgacttgctgcgagtgctggtggagctcacagacggcggctggtggatggtggactgtgaacctcactttccctatgttcagcagcacaaagggaagaagccaccacatcagcccaggagccctgagcagcacaggcagtagggccactcactttggccatccgcacccaaatgcaatcaatcaacccagcttcggaagctaccctaggatctcgtcaataaactgctaagaagccatcaactggcctaaagaaagagttcactgaagaacgcaattgctttaaagaaagaaaaattagtttcctatttaagtcttaaaaaaaagcaaaccatgtcctgagatgtctgtgttaatagtgcagagagaacctagggtttgaggttgctgtagcaatggcattggagaactttaacttgaacattctcatcgatacttcctggacatattttgtgtttttaacttacttagtatttatttgccttgttcatatgttcaattttctgaaatttcaattaaactattggtgtttcactttttacccaaaaaaaaaaa

SEQ ID NO: 379 - DNA, 1226 bp, Homo sapiens
  CDS (174)..(1223)
ggaattcccgggtcgacgatttcgtgcgacggctgctgtgtctcctggaaagggattcccgaaaggttttattccaaaaggagaggttggaagacatagctcatctcctgctgtgtatcagccaagaaggtgtgaggtggtgttccttggggatccgcttgcatctacttgggatgaatgaagaaggatggaggagagcagtgtgggaaaagaatatgaaaatgattgaactgcacaatggggaatacagccaagggaaacatggcttcacaatggccatgaatgcttttggtgacatgaccaatgaagaattcaggcagatgatgggttgctttcgaaaccagaaattcaggaaggggaaagtgttccgtgagcctctgtttcttgatcttcccaaatctgtggattggagaaagaaaggctacgtgacgccagtgaagaatcaggtgagacagcgtcagattcagaccctgtctccacaggaaagccaagaaggaattggtgtcattgctgtgaaacagtgtggttcttgttgggcttttagtgcgactggtgctcttgaaggacagatgttccggaaaactgggaaacttgtctcactgagcgagcagaatctggtggactgttcgcgtcctcaaggcaatcagggctgcaatggtggcttcatggctagggccttccagtatgtcaaggagaacggaggcctggactctgaggaatcctatccatatgtagcagtggtaaatggagctccttatcttgtcattcgtgctctgcttttggaaagtggaacactttcagagataacagatacttttttcagaattcacattttatatggtagaatctacatctgcaaaccacctgagaattctgttgctaatgacactggcttcacagtggtcgcacctggaaaggagaaggccctgatgaaagcagtcgcaactgtggggcccatctccgttgctatggatgcaggccattcgtccttccagttctacaaatcaggcatttattttgaaccagactgcagcagcaaaaacctggatcatggtgttctggtggttggctacggctttgaaggagcaaattcgaataacagcaagtattggctcgtcaaaaacagctggggtccagaatggggctcgaatggctatgtaaaaatagccaaagacaagaacaaccactgtggaatcgccacagcagccagctaccccaatgtgtga

SEQ ID NO: 380 - DNA, 1362 bp, Homo sapiens
  CDS (187)..(1359)
ggaattcccgggtcgacgatttcgtgcgacggctgctgtgtctcctggaaagggattcccgaaaggttttattccaaaaggagaggttggaagacatagctcatctcctgctgtgtatcagccaagaaggtgtgaggtggtgttccttggggatccgcttgcatctacttggggtggttttgaaacatgaatctttcgctcgtcctggctgccttttgcttgggaatagcctccgctgttccaaaatttgaccaaaatttggatacaaagtggtaccagtggaaggcaacacacagaagattatatggcgcgaatgaagaaggatggaggagagcagtgtgggaaaagaatatgaaaatgattgaactgcacaatggggaatacagccaagggaaacatggcttcacaatggccatgaatgcttttggtgacatgaccaatgaagaattcaggcagatgatgggttgctttcgaaaccagaaattcaggaaggggaaagtgttccgtgagcctctgtttcttgatcttcccaaatctgtggattggagaaagaaaggctacgtgacgccagtgaagaatcaggtgagacagcgtcagattcagaccctgtctccacaggaaagccaagaaggaattggtgtcattgctgtgaaacagtgtggttcttgttgggcttttagtgcgactggtgctcttgaaggacagatgttccggaaaactgggaaacttgtctcactgagcgagcagaatctggtggactgttcgcgtcctcaaggcaatcagggctgcaatggtggcttcatggctagggccttccagtatgtcaaggagaacggaggcctggactctgaggaatcctatccatatgtagcagtggtaaatggagctccttatcttgtcattcgtgctctgcttttggaaagtggaacactttcagagataacagatacttttttcagaattcacattttatatggtagaatctacatctgcaaaccacctgagaattctgttgctaatgacactggcttcacagtggtcgcacctggaaaggagaaggccctgatgaaagcagtcgcaactgtggggcccatctccgttgctatggatgcaggccattcgtccttccagttctacaaatcaggcatttattttgaaccagactgcagcagcaaaaacctggatcatggtgttctggtggttggctacggctttgaaggagcaaattcgaataacagcaagtattggctcgtcaaaaacagctggggtccagaatggggctcgaatggctatgtaaaaatagccaaagacaagaacaaccactgtggaatcgccacagcagccagctaccccaatgtgtga

SEQ ID NO: 381 - DNA, 902 bp, Homo sapiens
  CDS (228)..(704)
ccgaaatgcacacgaagtccggaactggtcttctgtgattttcattcgccctggtctctgttccctttcgtactcaaagctcgtgcatccagggaggggaaaccggagatagggtcttcgggccccgggcagaccctctgtgccgctgcaaaccgttgcagcctgaggctgtcaggtcctcccccagacacctgcggaccctccctctcctggcttcccgtctggtcatggcgagattctgggtctgcgtagccggtgctggcttctttcttgcatttttggttttgcattcgcgtttttgtggctctccagttttgaggaactttacttttgcagtttcctggagaactgagaaaattctttaccggctggatgtgggttggcctaagcacccagaatattttaccggaacaacattttgtgttgcagttgactccctcaatggattggtttacataggtcaaagaggggataacatcccaaagatattagtgttcacagaggatggatatttcctacgagcctggaattatacagttgacacacctcatggtatatttgcagccagtactctatatgaacaatccgtctggatcacggatgtggaagtggattcttggtcatactggtacccaatacgctccttgggaactggtcacagtctgggctactccagcaaaagggctaatttgatccttgcaggttgataaccagcgaatttgtggagggcccgcgaacttcctcgtgccgggacgcggcgcctaccatgtcaccggccatcgcagccgggctggaaggacggggcacaaacaccacggacacacgcgcggggggccacaacacacaaaccggcggtataaacacctcacacaacacccagcgcacacacacagtcctgtcct

SEQ ID NO: 382 - DNA, 1326 bp, Homo sapiens
  CDS (658)..(1323)
tccccgtgtctcatcctgtcctcaccctcagctctgctaaggacttgaattttgagggagccaaggtgacacttcactgtgaagcccagagaggttcactccccatcgtgtaccagtttcaacatgaggatgtcaccctggggatccctgtgtctcatcctgtcctcaccctcagctctgctgaggccctgacttttgaaggagccactgtgacacttcactcttcgctgatcctgcaagctccactttctgtgtttgaaggagacttcgtggttctgaggtgccgggcaaaggcggaagtaacactgaatactatgtacaagaatggtaacgtcctgacattccttaataaaagctctgacttccatattcatcacgcaagtctcaaagacaatggtgcatatcactttactggatttaacggaagtaatttctctgtttcttccaacatagtcaaaatccaagtccaagccatttacacgtccagtgctgagagccagctccttccagcccatcagcgggaacccagtgaccctgacctgtgagacccagctctctctagagaggtcagatgtcccgctccggttccgcttcttcagagatgaccagaccctgggattaggctggagtctctccccgaatttccagattactgccatgtggagtaaagattcagggttctactggtgtaaggcagcaacaatgccttacagcgtcatatctgacagcccgagatcctggatacaggtgcagatccctgcatctcatcctgtcctcactctcagccctgaaaaggctctgaattttgagggaaccaaggtgacacttcactgtgaaacccaggaagattctctgcgcactttgtacaggttttatcatgagggtgtccccctgaggcacaagtcagtccgctgtgaaaggggagcatccatcagcttctcactgactacagagaattcagggaactactactgcacagctgacaatggccttggcgccaagcccagtaaggctgtgagcctctcagtcactgttcccgtgtctcatcctgtcctcaacctcagctctcctgaggacctgatttttgagggagccaaggtgacacttcactgtgaagcccagagaggttcactccccatcctgtaccagtttcatcatgaggatgctgccctggagcgtaggtcggccaactctgcaggaggagtggccatcagcttctctctgactgcagagcattcagggaactactactgcacagctgacaatggctttggcccccagcgcagtaaggcgggatgttccttgctgagaaaaagaattcagtga

SEQ ID NO: 383 - DNA, 1742 bp, Homo sapiens
  CDS (501)..(1178)
gccgcaggccgctattttgttgcggttcgtacgccttccagctcaccaaaaacagtctcaaaaacaaccatttcctctctgctgagagccagggaaggcgagctctgcgcacacgggcgtccctgcagcagccactctgctttccactgctgcaggcgagaagaggcacgcgcggcacaggccggcctccgcttcccgggaagacggcgcactcctggccatgggttcttgctgctgcccaccctctgctccctgggatgggccccgaggcgagcagcttcagcacaggcctggccctgctccaggtgcaggaaggaggataaggccgggccgagaggcggcacacctggaccatcccatgggcctccgcccgcgccgccccgaggatgagtggtgatgtcctctagccacccctagcagcgtcggctctccctgtgactgtgctggccgcggactgggacttggctttctccggataagcggcggcaccggcgtcagcgatgaccgtgcagagactcgtggccgcggccgtgctggtggccctggtctcactcatcctcaacaacgtggcggccttcacctccaactgggtgtgccagacgctggaggatgggcgcaggcgcagcgtggggctgtggaggtcctgctggctggtggacaggacccggggagggccgagccctggggccagagccggccaggtggacgcacatgactgtgaggcgctgggctggggctccgaggcagccggcttccaggagtcccgaggcaccgtcaaactgcagttcgacatgatgcgcgcctgcaacctggtggccacggccgcgctcaccgcaggccagctcaccttcctcctggggctggtgggcctgcccctgctgtcacccgacgccccgtgctgggaggaggccatggccgctgcattccaactggcgagttttgtcctggtcatcgggctcgtgactttctacagaattggcccatacaccaacctgtcctggtcctgctacctgaacattggcgcctgccttctggccacgctggcggcagccatgctcatctggaacattctccacaagagggaggactgcatggccccccgggtgattgtcatcagccgctccctgacagcgcgctttcgccgtgggctggacaatgactacgtggagtcaccatgctgagtcgcccttctcagcgctccatcaacgcacacctgctatcgtggaacagcctagaaaccaagggactccaccaccaagtcacttcccctgctcgtgcagaggcacgggatgagtctgggtgacctctgcgccatgcgtgcgagacacgtgtgcgtttactgttatgtcggtcatatgtctgtacgtgtcgtgggccaacctcgttctgcctccagctttcctggttagcgcaacgcggctccacgaccacacgcacttcagggtggaagctggaagctgagacacaggttaggtggcgcgaggctgccctgcgctccgctttgctttgggattaatttattctgcatctgctgagaggggcaccccagccatatcttacactttggtaaagcagaaaaccaggaaaattttcttaaaatatccacaatattccttgagtgagtcagaatctatagccggttagtgatggtttcagacagaatcgtgttcgtgtctgttttgctcgattcctttcctaagttaaataaatgcaagcctctgaactctgtcaaaaaaaaaaaa

SEQ ID NO: 384 - DNA, 6649 bp, Homo sapiens
  CDS (698)..(3334)
gcagcagagccttcgctgacgccaagaggcagggaggcgcaggcagggcgcaggcggcggcgggcggcatggagagcctgctggagaatccggtgcgcgccgtgctctgcctcaaggagctcacggccatcgtgcagaagcagcagagcctcatccacacccagcgagagcgtatcgacgagctggagcggcggctggacgagctgagcactgagaaccgcagcctgtgggagcaccagcagctgctgcaagcccagcctccgcccgggctcgtccccccgtcatcggccccgctgccggccgctccggccaccgctcctgccgccgccgccagggcccaggaacctctccaggaccagggacagcgctcagcagccgcgccgcatcccgcgcccgatcggccgccgcgtcagcaccacggacagctcctggagcagccccagcggggccctggcagcagggctcacacaccccagtcgccccagaagcatctggggacacaaggggccgtgactgacaaggagaaggagcgtcccccgagttgctgcgctgctgccggagccctccttcagcacaaatccccctccgccctcggcaagggcgtcctgagcaggagacctgagaatgagaccgtgctgcaccagttctgctgcccagccgccgacgcctgctccgacctggcctcccaaagattgaaatgctagaacataagtacggcggtcacctggtgtcccggcgcgccgcttgcaccatccaaaccgccttccgccaataccagctcagcaagaacttcgagaaaatccgcaactcgcttctggagagccgcctgccacggcggatctccctgcgcaaggtgcggtcacccacggccgagagcctggcggccgacaaagcgctcatggagggctacggcctcgtggggctgccgctggtgcgctcgccctccctgccgcccaccttcgcaggcaccctcaccgagctggaggactccttcaccgagcaggtgcaatccctggccaagtccatcgacgacgcgctcagcacgtggagcctcaagaccatgtgctccctgcgggagagtggcgcttaccagctccaccaggccctgcaggcggccgcggggcccccaggcctggaggccgaggggcgggcgccggaaagcgcgggccccgggcccggggatgacgccgcggagacccccggcctgcccccggcccacagcgggaccctcatgatggctttccgggacgtcacggtgcagatcgccaaccagaacatatccgtctcctcctccacggctctgtcggtggccaactgcctgggctctcagacggtccaggcccccgcagagcccgcggcgggcaaggccgagcagggcgagacctctgggcgggaggccccggaagcccccgccgtgggccggggggacgcgtcagccgaggactcatgcgcagaggctggggctagtggggcggcggatggggccacagcccccaaaacagaggaggaagaggaggaggaggagacggcggaggtggggagaggggccgaggccgaggcaggcgacttggagcagctgagcagcagcagcacgtccaccaagtccgccaagtcaggctcggaggcgtcggcctccgcctccaaggacgccctgcaggccatgatcctgagcctgccgcgctaccactgcgagaacccagccagctgcaagtcgcccacgctctccaccgacaccctgcgcaagcggctctaccgcatcggcctcaacctcttcaacataaaccccgacaagggcatccagttcctgatctcacgcggcttcatcccggacacccccatcggtgtggcccatttcctcctccagcgaaagggcctcagccgccagatgattggagagttcctgggcaacagcaagaagcagttcaaccgcgacgtgctggactgcgtggtggacgagatggacttctccagcatggagctggacgaggccctgcgcaagttccaggcacacatccgtgtgcagggggaggctcagaaggtggagcggctcattgaggccttcagccagcgctactgcatgtgcaaccccgaagtggttcagcagttccacaaccccgacaccatcttcatcctcgccttcgccatcatcctcctcaacaccgacatgtacagccccaacatcaagcctgaccggaagatgatgctggaggacttcatccgaaaccttcgaggtgtggacgatggcgctgacatccccagggagctggtggtaggcatctatgagaggatacagcagaaggagctcaagtccaatgaggaccacgtcacgtacgtcaccaaggtggagaagtccattgtgggcatgaagacagtgctgtccgtgccccaccgccgcctggtgtgctgcagccggctcttcgaggtgacggatgtgaacaagctgcagaagcaggcagcgcatcagagggaggtgttcctcttcaatgacctgctggtgattctcaaactttgcccgaagaagaagagctcctccacgtacaccttttgcaagtcagttggcctgctgggcatgcagttccagctctttgagaacgagtattactctcatggcatcacactggtgaccccgctctcgggctccgagaagaagcaggtgctgcatttctgtgccctgggctcggacgagatgcagaagttcgtggaggacctgaaggagtccattgctgaggtgacggagctggagcagatccgaatagagtgggagctggagaagcagcagggaacaaagacactctccttcaagccctgcggagcccagggggacccacagtcaaagcaaggatcgccgacagccaaaagggaagccgcgctcagggagaggccggcggagagcacggtggaggtgtcaattcacaacaggcttcaaacgtcccagcacaactccgggctgggggccgagaggggagcgccggtgccgccgccagacctgcagcctagccccccgagacagcagaccccaccactgccgccgccgccacccacgcccccgggcaccctggtgcagtgccagcaaattgtcaaggtcattgtcctggacaagccctgcctggcccgcatggagcccctgctgagccaggctctctcctgctacacctcgtcgtcctctgactcctgcggctccacacccctgggcggccccggctctccggtcaaggtcacccaccagcctccgctgcccccgcccccacccccctacaaccaccctcaccagttctgtcccccaggctccctgctgcacgggcaccgctactccagtggctcaaggagcctggtgtagactctgccccaccaccctgctgtcctgggagggctggccactggggggcctgggctgcccctccactgctccccataccctggcacgatgcgttcctggtcactgatcaccatcattttgggaagagaatcccaatccctggcacctgggtttgcctcatccaaccatccttccctttctcagctgcaccccctctgcagatctgaagacacacctcactctcccagggccctacacagccagacccggcgaggcctcctcttcccctggccaccactttcccccattggaccatggactgaagaaaacgagctgagggtctaacgagcttgcaggctttgagtctgttagtgcccggggcctcgggccttgggcagcagcatgaggctgggccggccggcagtggagcactagacagagtggctggctcgcagcccagaactagtgcctctgtagctgcactgaggggaggagggttggtcccacccctggagggacaggtgggaggagtgaggagggggctttttctgccacccccgcccccaagcctgaaactctcaggagtctacttcttggtccccagggacattggctgtcctgaccatgtccttccccctcctcccagggcctctgcttcctcaggagctgcccagactccagaaaagcctggaaaaagggaggcgggaaggggagcactttcggctttctataggtcagtccagcagggccatgggatcgcgaggtcatgtatctgcaaaatgcacctttttaaagagtgtcttagttccccagccccagctaatacccggccaatgccgtgtacgcacaggcatgtgcacgcaaacacgcatgagaaccaggccattccttccgctgtggaagcagaactggagacggggcaggaatgtgcccagcagagatggggctcagcccgaggcagggctccctcctgcatgaggctcggcccgaggcagggctccctcctgcatgagtctgtggcctccaggagggacttgggtgcagatgtaagcaagaaaaaccggggctccagaggcatgtgcatttcccctgcgcccctcagcctttaaatattccctcctcctagaaggttctagaccccccccttccagcaggggtgcccaagagtccctggaccctcaaaattgcaaaggagacccaagcggggctcgctgacctcccagggcccagcaagatgggatagccagccttaggtggccccacgagcccaagcctggggaagggcccctccccagccagacgagaggcagccaccccagagaccacaggagccgtaccatggcctgcgcagtcaggccctatcaggatgtgtctgtcccaagcctggccaggctccagtcctgtgccagtagctcactgctgtcctatgtgcaggtcccccaacacttggagcctgtggttaaggcctcctgggagaggcagtgagcatgagtcaaaggtgacatggacttgaatctccccaccccgccccgcctgcagtagccgggccaggtaggaggcaaggatcattccctgctcccagaggttccagatgacctagtttcgttttgtgtgtgtgtgtgtgtggtcacccagacgtcactgtgatatcacctagtgaatctatttctggccctgtcttcgtcggcccagtttctgtaacttgcagccaatttgccctctcccctgtggctgccagcccatctgcccctctgtgtccttgctgccctggccctcctctgttttctgtaacagatgctccagtcattgcctttcagagtggagcagatgacagatggggtgcacgcattcagacacctctgatgcccttagccagggcagggatcgtccttaaagtgaaggcctggacaggaggagtcagggacttgggaggaggtggagctgtggggatgggagtggaggaatcaaaatgagggaagctgaaaatagaatgaaaacgatgactaagaggcagggagtgcgaggtatgggggaataggaactatgagctaaatatacttatggggtgggggccgtgggggccagggacactctcccagacagccctgacccgccaggcaggaccccgtcccctgctcacacagctcttcaagcttaccaaggacaggcaggaccccgtcccctgctcacacagctcttcaagcttaccaagtgccctcaacaggggagagcaaccccaggccctccctcccacctcagctgaagccccaatcttccaaatcggaaccagcaagtcttagggctggcacgcatctgggcctctagctgagaacccggactctcaggcacctcagtgcccctgccccagggcagaggcccaccccgtgggttggtgcagtggctgccctgggctccacgggcagcacagggagtctgtccaggaagcagcccagccggggtcagtattccgtggagccagtcctgagctgggaggggcatttaacacccctgagggcctggggcaggacacagctggccctcctcattgtcaggggaagcaagtgcccaacatctgtaacctcccttccctgctcagtccccaggccaaggttgggacccctctccatccctgtccccagagcctagacctcagggacctaggaaaagcctcttgctccctccccacggcagcagacagggcagggcctccagcccccagagggccggtggggggtgctctcgggccttcctgctctcctaaggttgcggggacagtagagtgctgagccccagacccagtcaccccaagatggccccactctatccactctctagacctttgggaaatctgggtccctctcctgatttgatccattcggccccaactccagagtcgggaatgggagatgaaactagttttccacccacttttggacaagtcccacccctagatctgaagcaagctctaccagcagcgtgtcctggaagcctgcctgcctgcctgcccgtctgcacaggtgtcttgatccagccctgcgtcttcgagcccctgtgccaccggtccccacggcccgccaggagtctctttgtacccactaggcttccctgatgaccatctgtctgtccgtccctgtttttgctgtacataactcctgctgcaccctctccccgcacacccgtcacccatgagagagaaacctctctagggaaaggcagggtggctgcacccagcaactaatccaaatggcaaatattttgtaacaaaatagcccagaggtattttatctgttcaattcatagagttttagagattatattgaaagatgtcacttg

SEQ ID NO: 385 - DNA, 3161 bp, Homo sapiens
  CDS (107)..(2590)
gctgaggccaccatgtgacacggcgccgcatcgttgtgcgaccaagcagcggcgccctggtgcctctcgtccatgctcctgggccccagccccgcgcaggccaaggatgaggccgaggcccgaaggtagggggctccgggcgggagtcgcgctgtcccccgcgctactgctgctgctgctgctgccgccgccgccgacgctgctggggcgcctgtgggcagcgggcacaccctcgccgtcggcgcccggagctcggcaggacggcgcgctgggagccggccgcgtcaaacgcggctgggtgtggaaccagttcttcgtggtagaggagtacacgggcacggagcccctgtatgtgggcaagatccactccgactcagacgagggtgacggggccatcaagtacaccatctcaggcgagggtgctgggaccatcttcctgatcgacgagctgacaggcgacattcatgccatggagcgcctggaccgcgagcagaaaaccttctacacgctgcgggcccaggctcgggatcgcgccaccaaccgcctactggagcccgagtcggagttcatcatcaaggtgcaggacatcaatgacagtgagccccgcttcctgcacggcccctatattggcagcgtggccgagctctcacctacaggcacgtcggtgatgcaggtgatggcctcggatgcggatgaccccacgtacggcagcagcgctcggctggtgtacagcgtgctggacggcgagcaccacttcaccgtggaccccaagaccggcgtaatccggacggctgtgcctgaccttgaccgcgagagccaggagcgctacgaggtggtgatccaggccacagacatggcgggtcagctgggtggcctctcgggctccactaccgtcaccatcgtagtcaccgacgtcaatgacaacccgccccgtttcccgcagaagatgtaccagttcagcatccaggagtcagcccccattggaacggctgtgggacgtgtgaaggctgaggactcagacgtgggagagaacacagacatgacttaccaccttaaggacgagagcagcagcggcggcgatgtgttcaaggtcaccacagacagcgacactcaggaggccatcatcgtagtgcagaagcgcctggacttcgaatcccagcccgtgcacaccgtgatcctggaggccctcaacaagttcgtggacccccgcttcgccgacctgggcacgttccgcgaccaggcgatcgtgcgcgtggccgtgaccgacgtggacgagccccccgagttccggccgccctccggcctcctggaggtgcaggaggacgcgcaggtgggctccctggtcggcgtggtgacggcgcgggaccccgacgccgccaaccggcccgtccggtacgccattgaccgcgaatcagatttggaccagatcttcgatatcgatgcggacacaggcgccatcgtgactggcaaggggctggaccgcgagacggccggctggcacaacatcacagtgctggccatggaggcggacaatcatgcacagctatcccgggcatccctaaggatccgaatcctggatgtgaacgacaatcccccagaactggccacaccctacgaggcagctgtatgcgaggatgccaagccaggccagctcatccagaccatcagcgtggtggacagagacgagccccaaggcgggcaccgcttctatttccgcctggtgcctgaagctcccagcaaccctcatttctctctgcttgacatccaagacaacaccgctgcagtgcacacgcagcacgtgggcttcaaccggcaggagcaggacgtgttcttcctgcccatcctggtggtagacagtgggccgcccacactgagcagcacaggcacgctcaccatccgcatctgtggctgcgacagctccggcaccatccagtcctgcaacaccacggcctttgtcatggccgcctccctcagccccggcgccctcatcgccctcttggtctgcgttctcatcctggttgtgctggtgctgctgatcctcaccctcaggcgccaccacaagagccacctgagctcggacgaggatgaagacatgcgggacaacgtcatcaaatacaacgacgaaggcggcggcgagcaggacaccgaagcctacgacatgtcggcgctgcggagcctctacgacttcggcgagctcaagggcggcgacgggggcggcagcgcgggcgggggagcgggcgggggctcgggcgggggcgcgggcagccccccgcaggcccacctgccctccgagcgccactcgctgccgcaggggccgccgagccccgagccagacttctcagtgttcagggacttcatcagccgcaaggtggcactggcggacggggacctgtcggtgccgccctacgacgccttccagacctacgccttcgagggcgcggactcgccggccgcctcgctcagctccctgcacagcggctcgtcgggctccgagcaggacttcgcctatctcagcagctggggtccgcgcttccggcccctggccgcgctctacgccggccaccgcggggacgacgaggcccaggcctcctagcccctcgccctgccgtcggggcgcggctgctcacccgcccagcacacgccggggccccaggacaacgcgtttcccccgcggaccccctttcctgccctcccccaaccctcccttggcggctggacggaggggggacttgctaggagcggactcttccattcctcctcctctaggggtgcagctttggagcccagaggtgcgggattctgaccaacggcattaaaactgaggcgagaccgggcacggtgtggctctggggttagaatgggagatgggggtggcgttgcagagtcgggaaggggcgggtcactcaatcctggcctgggggagaatgctggagggagcacgccgctgagatgcccccaccccaggtttcccccatcagagttaagaggaaagaaggctgttcacttactaagcacctactgtgtgctgggacgctgtacagagaccagctcagtcgtcagagaaaccatgaggtggtgtcctgcacggaatagaaggggaaaggaccccagagaagtggctgtgacccgtccaagggcacctggccagtgaatggcagagc

SEQ ID NO: 386 - DNA, 1617 bp, Homo sapiens
  CDS (708)..(1331)
aaaaggataaagataaagtttctctaaccaagaccccaaaactggagcgtggcgatggcgggaaggaggtgagggagcgagccagcaagcggaagctgcccttcaccgcgggcgccaatggggagcagaaggactcggacacaggaccgccggggtcctgcttgtcctggggcagccacgagggagccctcgtcaggagcgccatgggccgaagctgcctgccctctgcacgtggatgtttctttggaacaaggggaaaaattatgattttcttattttgctttgacctgtgaatgacaccctggtctctggtgcctggggtgtgctctctgcagtgctgccaggcacatgctggttccttcagcgttaggtgcttggcaccttcagtcttttcctgacgtcatgtttgttcctggtgcctcagataggagacggctgttctgacggctcctgcttccccattcctggagggaagacagacttagccactggtatctgtgggacttcttggaactctgaatgccagaccttgcccagtgctagaggcgacaagtgtgtgaagttgaagaggcttctcccacctgctcagctgcagtggacccgagcgggcagagagagcagagtgcagcaggggccaggctgtgctcgcaggcggggcaggtgcctggagagcatggcgcccctgggagcctctggccaggaagggcatgtgcactgcagtgtgccgtggaccagtggcctcagctcagtgtgttgacgagggtcccaaggcactcacgtgtgtggggatgttagcaacacacggcggggaagccctgatgcagtttctcaccaagcgtgtagcagaccccacgcaccccacacagggcaggcaccccacacagggcacagaccccacgcaccccacacggggcaggcagctcacacagggcacagaccccacgcaccccacacagggcacagaccccacgcaccccacacagggcacagaccccacacaccccacacagggcaggcacctcacacagggcacagaccccatgcatcccacacagggcaggcaccccacacagggcacagaccccacacaccccacacagggcaggcaccccacacagggcacagaccccacgcaccccacacagggcagggatcccacgcagggcacagatcccacgcagggcagggccagcccaaggccaggcccctcccctgtagatctcctcccaggcaggaccagagccacagtcacttccacactatctccttccctagaaacctctgcagactcttcctcctctcctcgatacacaggggcccctgccacagcctgactctctgccacctcgtgagtctctggaaagcagggtcggcctctgaatacagaggacttgggtcctgccggaggatgcttggccagtgggtgctggcacgtgagcagcccccggggagtcagagtggggctgcagcgaaggccgtggtggtcgaggtgagggtggtggccaggtcttgttgccgcagtgaggattctggggttaccctaagagccaccacattcaggcactcaagaaaaagcacgtcaaaataaaatattttcacatgattaaaaaaaaaaaa

SEQ ID NO: 387 - DNA, 429 bp, Homo sapiens
  CDS (28)..(426)
cgagtggctcttctcagcaagtgttccatgatggttgagcccttcttgggaacctggaagctggtctccagtgaaaactttgaggattacatgaaagaactgggagtgaatttcgcagcccggaacatggcagggttagtgaaaccgacagtaactattagtgttgatgggaaaatgatgaccataagaacagaaagttctttccaggacactaagatctccttcaagctgggggaagaatttgatgaaactacagcagacaaccggaaagtaaagagcaccataacattagagaatggctcaatgattcacgtccaaaaatggcttggcaaagagacaacaatcaaaagaaaaattgtggatgaaaaaatggtagtggaatgtaaaatgaataatattgtcagcaccagaatctacgaaaaggtgtga

SEQ ID NO: 388 - DNA, 2969 bp, Homo sapiens
  CDS (567)..(2711)
gagccagaggggttggaggagactgagcacctggggtgaggggagctgccgggcctttcagcccggtggtctccacgatgctcccatctgtgtggacgacaatcagtgtcgctttttcggtgttcaggctgtccccgatctgaagggccgtcctaccagacagaacatgtcctgagatggatgccgcgttcgccacagacgtggtgaagacattgtctgcagcagcccccacgttggccactgtcactgtggtcacctctgccccgtcctgcccactcccagctctggggcttggtgggggcaatccctgcgtccggagagcgctggtggtagggaggcttctcccggttctgtgagcagcaggaccctcccgagggcctgaccgtggaggtagcactgcacacccactccctgtgggccggagccaggaggcacttcctgggtgtcggagcccagaaggaaaccagtggccgggaagcaccagctgggtgtgggacaggcactggcctcagaccggggccacactgaggtctgcccttctcccgctggccgccacccaagacaccatgagccagtccggggccgtgagctgctgcccgggtgccaccaatggcagcctgggccggtccgacggtgtggccaagatgagccccaaggacctgtttgagcagaggaagaagtattccaactccaacgtcatcatgcacgagacctcgcagtaccacgtccagcacctggccacattcatcatggacaagagcgaagccatcacgtctgtggacgacgccatccggaagctggtgcagctgagctccaaggagaagatctggacccaggagatgctgctgcaggtgaacgaccagtcgctgcggctgctggacatcgagtcacaggaggagctggaagacttcccgctgcccacggtgcagcgcagccagacggtcctcaaccagctgcgctacccgtctgtgctgctgctcgtgtgccaggactcggagcagagcaagccggatgtccacttcttccactgcgatgaggtggaggcagagctggtgcacgaggacatcgagagcgcgttggccgactgccggctgggcaagaagatgcggccgcagaccctgaagggacaccaggagaagattcggcagcggcagtccatcctgcctcctccccagggcccggcgcccatccccttccagcaccgcggcggggattccccggaggccaagaatcgcgtgggcccgcaggtgccactcagcgagccaggtttccgccgtcgggagtcgcaggaggagccgcgggccgtgctggctcagaagatagagaaggagacgcaaatcctcaactgcgccctggacgacatcgagtggtttgtggcccggctgcagaaggcagccgaggctttcaagcagctgaaccagcggaaaaaggggaagaagaagggcaagaaggcgccagcagagggcgtcctcacactgcgggcacggcccccctctgagggcgagttcatcgactgcttccagaaaatcaagctggcgattaacttgctggcaaagctgcagaagcacatccagaaccccagcgccgcggagctcgtgcacttcctcttcgggcctctggacctgatcgtcaacacctgcagtggcccagacatcgcacgctccgtctcctgcccactgctctcccgagatgccgtggacttcctgcgcggccacctggtccctaaggagatgtcgctgtgggagtcactgggagagagctggatgcggccccgttccgagtggccgcgggagccacaggtgcccctctacgtgcccaagttccacagcggctgggagcctcctgtggatgtgctgcaggaggccccctgggaggtggaggggctggcgtctgcccccatcgaggaggtgagtccagtgagccgacagtccataagaaactcccagaagcacagccccacttcagagcccacccccccgggggatgccctaccaccagtcagctccccacatactcacaggggctaccagccaacaccagccatggccaagtacgtcaagatcctgtatgacttcacagcccgaaatgccaacgagctatcggtgctcaaggatgaggtcctagaggtgctggaggacggccggcagtggtggaagctgcgcagccgcagcggccaggcggggtacgtgccctgcaacatcctaggcgaggcgcgaccggaggacgccggcgccccgttcgagcaggccggtcagaagtactggggccccgccagcccgacccacaagctacccccaagcttcccggggaacaaagacgagctcatgcagcacatggacgaggtcaacgacgagctcatccggaaaatcagcaacatcagggcgcagccacagaggcacttccgcgtggagcgcagccagcccgtgagccagccgctcacctacgagtcgggtccggacgaggtccgcgcctggctggaagccaaggccttcagcccgcggatcgtggagaacctgggcatcctgaccgggccgcagctcttctccctcaacaaggaggagctgaagaaagtgtgcggcgaggagggcgtccgcgtgtacagccagctcaccatgcagaaggccttcctggagaagcagcaaagtgggtcggagctggaagaactcatgaacaagtttcattccatgaatcagaggaggggggaggacagctaggcccagctgccttgggctggggcctgcggaggggaagcccacccacaatgcatggagtattatttctctactcgtgtatgtctttcggatccccgacccggcgggggtgtggtgctggtaaaagtcctgccctgttgggggccaacgccctcctttgcaacgtgccacggccgccccccagatttcccaaccgcgctgttggtcgccttgtccttcttggccgctctcggggcctttgcccgccggggcgcctcc

SEQ ID NO: 389 - DNA, 1637 bp, Homo sapiens
  CDS (151)..(441)
ttattttctacgagctgtgagctaactaacccgaggccgtttttaatacacgaggaactcatgcaaaggaggggactttcggaaatccaaacttagagtgccttgtatttagaatccggaaggaaaaggaaatgaaatgtgaagaaactcatgcaccaaactcgaactggtaagaagactgttagaatgccctcggtaacacagaggctgagagatcctgacataaatccttgtttgtcggaatctgatgcttccaccagatgtctggatgaaaataactatgacagggaaaggtgttccacttacttcttgaggtacaaaaactgccggagattctggaattctatcgtgatgcagagaagaaagaacggagtgaagccatttatgcctacggcagcagaaagagatgaaatcttgagagcagtgggaaatatgccctattgaatgtttgcattaaaagtgtttatataacttagaagcagatgaatatttctaataaatgattgctgtaatatttaagactgtacacccctcacccagacagaccttaagttcttcaagtggagacagtgaagtcaccccgtgtcctttttgcttgctctcagtgccatgccgatggtatgttgctgttggctgtgttgtggcatgagtttgcatgactttctggaggcatggagttaggtaaggctacatgagaaattgagcttttccactgggttttgaaagaagagtatgatgtgaacaagtaaagactgaatggggctgagatgaaggcaatgtttccaaggaaaggaaatgttatgagcaagagtgtgaggcaagagaagctggaaccacattcagagagtatcctgtagattgctccacctagaatctcaggtgggtggagcagtggtgggagaagactggaaaggtaagttgaaggtaaggaatgtgtggtgggcctcagatcccaggctcattcctcaaatcacttcttacttccctcacttatctttgtttaaataaggttagtacattcactaggggcaaatgggtttttctaaataaatgacataaaaaagaactggttgtctttctttaaagaaagtcttagttacaggattctgtgattaaaatccttaaatattgggttgccttctgcagctgtagtatcagtttttgaaccacagtaatgggaagaaagacaaatggattcccttagaagtaagatttctatttgcaggatgagttgggcagggaaaagggtcagggttcatcaggtgaactcaacactgggatgagactagaacttcactttatgatataaacacaatacgattattcaatgtggtgactggggtagactgtgaagcagccctccttatgcccactgccttttagaatcgtttgttttattcatggtagttttatgaagacatactattattgaatgaaatttaatgtgtacttgaaaacattgcttttgtcccttctcttcatctggtcttgggtcaagaacattgttttaatggctgccgacaatgaactgtctgtctgagtctaaaaccaagctcaggtttctaagccacatgaccttgattgttaaatgtagttatatttgaataaaaaatgaatcatttccaaaaaaaaaaaaa

SEQ ID NO: 390 - DNA, 4483 bp, Homo sapiens
  CDS (191)..(4000)
gctaaatgtcccaaggggattattacagaaatgttagaaagtactattgtttttatatttgagtgatgtgtttgaaaatcactttaaaatggctggaatgatcttccaagatctaacggtagggtaaggagattgcttttctcacctgatgaaacaaatacatacttttcatcttttgcagagttgaacaatgaccatagttgacaaagcttctgaatcttcagacccatcagcctatcagaatcagcctggcagctccgaggcagtctcacctggagacatggatgcaggttctgccagctggggtgctgtgtcttcattgaatgatgtgtcaaatcacacactttctttaggaccagtacctggtgctgtagtttattcgagttcatctgtacctgataaatcaaaaccatcaccacaaaaggatcaagccctaggtgatggcatcgctcctccacagaaagttcttttcccatctgagaagatttgtcttaagtggcaacaaactcatagagttggagctgggctccagaatttgggcaatacctgttttgccaatgcagcactgcagtgtttaacctacacaccacctcttgccaattacatgctatcacatgaacactccaaaacatgtcatgcagaaggcttttgtatgatgtgtacaatgcaagcacatattacccaggcactcagtaatcctggggacgttattaaaccaatgtttgtcatcaatgagatgcggcgtatagctaggcacttccgttttggaaaccaagaagatgcccatgaattccttcaatacactgttgatgctatgctgaaagcatgcttgaatggcagcaataaattagacagacacacccaggccaccactcttgtttgtcagatatttggaggatacctaagatctagagtcaaatgtttaaattgcaagggcgtttcagatacttttgatccatatcttgatataacattggagataaaggctgctcagagtgtcaacaaggcattggagcagtttgtgaagccggaacagcttgatggagaaaactcgtacaagtgcagcaagtgtaaaaagatggttccagcttcaaagaggttcactatccatagatcctctaatgttcttacactttctctgaaacgttttgcaaattttaccggtggaaaaattgctaaggatgtgaaataccctgagtatcttgatattcggccatatatgtctcaacccaacggagagccaattgtctacgtcttgtatgcagtgctggtccacactggttttaattgccatgctggccattacttctgctacataaaagctagcaatggcctctggtatcaaatgaatgactccattgtatctaccagtgatattagatcggtactcagccaacaagcctatgtgctcttttatatcaggtcccatgatgtgaaaaatggaggtgaacttactcatcccacccatagccccggccagtcctctccccgccccgtcatcagtcagcgggttgtcaccaacaaacaggctgcgccaggctttatcggaccacagcttccctctcacatgataaagaatccacctcacttaaatgggactggaccattgaaagacacgccaagcagttccatgtcgagtcctaacgggaattccagtgtcaacagggctagtcctgttaatgcttcagcttctgtccaaaactggtcagttaataggtcctcagtgatcccagaacatcctaagaaacaaaaaattacaatcagtattcacaacaagttgcctgttcgccagtgtcagtctcaacctaaccttcatagtaattctttggagaaccctaccaagcccgttccctcttctaccattaccaattctgcagtacagtctacctcgaacgcatctacgatgtcagtttctagtaaagtaacaaaaccgatcccccgcagtgaatcctgctcccagcccgtgatgaatggcaaatccaagctgaactccagcgtgctggtgccctatggcgccgagtcctctgaggactctgacgaggagtcaaaggggctgggcaaggagaatgggattggtacgattgtgagctcccactctcccggccaagatgccgaagatgaggaggccactccgcacgagcttcaagaacccatgaccctaaacggtgctaatagtgcagacagcgacagtgacccgaaagaaaacggcctagcgcctgatggtgccagctgccaaggccagcctgccctgcactcagaaaatccctttgctaaggcaaacggtcttcctggaaagttgatgcctgctcctttgctgtctctcccagaagacaaaatcttagagaccttcaggcttagcaacaaactgaaaggctcgacggatgaaatgagtgcacctggagcagagaggggccctcccgaggaccgcgacgccgagcctcagcctggcagccccgccgccgaatccctggaggagccagatgcggccgccggcctcagcagcaccaagaaggctccgccgccccgcgatcccggcacccccgctaccaaagaaggcgcctgggaggccatggccgtcgcccccgaggagcctccgcccagcgccggcgaggacatcgtgggggacacagcaccccctgacctgtgtgatcccgggagcttaacaggcgatgcgagcccgttgtcccaggacgcaaaggggatgatcgcggagggcccgcgggactcggcgttggcggaagccccggaagggttgagtccggctccgcctgcgcggtcggaggagccctgcgagcagccactccttgttcaccccagcggggaccacgcccgggacgctcaggacccatcccagagcttgggcgcacccgaggccgcagagcggccgccagctcctgtgctggacatggccccggccggtcacccggaaggggacgctgagcctagccccggcgagagggtcgaggacgccgcggcgccgaaagccccaggcccttccccagcgaaggagaaaatcggcagcctcagaaaggtggaccgaggccactaccgcagccggagagagcgctcgtccagcggggagcccgccagagagagcaggagcaagactgagggccaccgtcaccggcggcgccgcacctgcccccgggagcgcgaccgccaggaccgccacgccccggagcaccaccccggccacggcgacaggctcagccctggcgagcgccgctctctgggcaggtgcagtcaccaccactcccgacaccggagcggggtggagctggactgggtcagacaccactacaccgagggcgagcgtggctggggccgggagaagttctaccccgacaggccgcgctgggacaggtgccggtactaccatgacaggtacgccctgtacgctgcccgggactggaagcccttccacggcggccgcgagcacgagcgggccgggctgcacgagcggccgcacaaggaccacaaccggggccgtaggggctgcgagccggcccgggagagggagcggcaccgccccagcagcccccgcgcaggcgcgccccacgccctcgccccgcaccccgaccgcttctcccacgacagaactgcacttgtagccggagacaactgtaacctctctgatcggtttcacgaacacgaaaatggaaagtcccggaaacggagacacgacagtgtggagaacagtgacagtcatgttgaaaagaaagcccggaggagcgaacagaaggatcctctagaagagcctaaagcaaagaagcacaaaaaatcaaagaagaaaaagaaatccaaagacaaacaccgagaccgcgactccaggcatcagcaggactcagacctctcagcagcgtgctctgacgctgacctccacagacacaaaaaaaaaaaaaaaaaaaaaaattggcggccgcatcattggtccttttccaccattttcagcccctccaggctgtggaggacccggcggccacactcttggagcctcggctgaagtgcctgggcatgacgccgtttctctgacgtcccccatagatcttggtcatggagccaactccagcgccaccccggaggtacaggtgccgcgctgtggaagcaggctcgctggtagaagcagttctcatccgtaggagcaagctctttgtgcttggccagcttgacggtatccaaccattcggggactttcagcttcccggactttatgaaggaaggctggcagaagcgctgacgaactgctggttggttgcacgttcttttaagttaacttccaggcaccgttgtggcctccgcactggccagcaagcctcgttccgcgattctttggtctcgtagggcaaatttccttatagtgaggtcgtgttgaaactccgtatcacggtcctggttgtttgctcgtgttgaatgtgtgtgcgtctacccgtgtccccgagataagcgagtctgagaggttaatgtgtatggccttgggtgctca

SEQ ID NO: 391 - DNA, 1643 bp, Homo sapiens
  CDS (241)..(1245)
ctggggatgattttgggatgccttgaaaaaatgtcatgaagtagaaaggcactctccttccacatggaccacaggaggaaaagagccgcaaatgcacccctgaggcagtcctcagcagccctcagttgtgggggcaatcggcaccactgttcccatcctgacgcagtatagaaccacaggcatcgtagtcagcatttttttgagataactgatgaccaattcgacttccatacatactgcatgagaaagatgacccttcgtgcctatgttgaccttttgagattagaagatatactcagaagacatgccttttatttcaaggctgctagatcagcgattgaaatatacttgaaattgtatgataatcccttaaccaatgaaagcaaacaacaagaaataaactcagaaaacttgtcagccaaagaattgaagaaaatgcttagcaagcagagaagagctcagaaaaaggctaaactagaagaagaaagaaagcatgcagaaagagaacgtcaacagaaaaatcaaaagaaaaaaagagatgaagaagaagaagaagccagtggccttaaggaagaacttatacctgaaaaattagaaagggtagaaaatccattagaggaagccgttaagttccttatacctcttaagaaccttgttgctgataacattgacactcatctgttagcatttgaaatatattttagaaaaggaaagtttctgttaatgctgcagtctgtcaaacgagcttttgccattaacagtaataacccatggttacatgaatgtttaattagattttctaaatctgtgtctaatcatagtaatcttccagacattgtgagcaaagttctatctcaagaaatgcagaaaatatttgtcaaaaaggatttggaaagttttaatgaggattttctgaaacgtaacgctacctctcttcagcatctactttcaggtgctaaaatgatgtattttctggacaagtcaaggcaggagaaagcaattgctatagccactagactagatgaaactataaaagataaagatgtaaagacattaataaaggtttctgaagcactgcttgatggcagctttgggaactgtagttcccaatatgaagaatataggatggcctgtcataacctgcttccttttacatctgccttcttgcctgctgtgaatgaagtcgacaatcctaatgtggcactgaaccatacagctaattatgatgtcttggcaaatgaaatttgaaatcttctagaaagtagactcctatagactcaaagctgaattgagatcagggtttcttttccaggttgcattttaatatacgtatgaaatgaaatatttggttaggatttttaaatggcatattctgtaagcttattttgttctttacccgacctgccaatttacataaccatctgttaaaattacctgtttattcttacacagttttgtggtagctccgatcgcttctgtataattataatttcttactaagctaagttgtatacaaccccactgtattattttctttagattctgatttcaggatctgtgctttgattccttgtctgttttatcgtatatttgcttgctttttaattaaagcacatcagttttaaagtgttaactatatgtta

SEQ ID NO: 392 - DNA, 2416 bp, Homo sapiens
  CDS (314)..(1546)
ctatgtctgctggtgttaatcggccgaggcgcagatggcggcgcccagaggctgctgaggcgcggaacggagtgatggctgctggtggcgttggtggctgggtgctcgtgctgggtgcggcggctgagctgtgtgccggtggctggtggctgaggtgcactggacctggctggccagtgcgctcccgtgagccgtgcgcgaagctgtgcagaagcctgagtgctggagtgtgccctgtgtgtaccagtactgtgtgtgctgaagctgctgcttgccctgctgcctgatcgcgtcttcagtgtgtgtgtgcttcatgcattctctgtgtgtgtgcgcttggtgctgttgcctatcctattgttggttgcccatgcttcctgtgtgccctgtgtgcccctgctgcctgtgcgccctgacctgctgcctgcagttgatccatgccctgtgccctatcgcctggatgcttggaccaaaagattatcatcttgctgcttgcggctatggattcacactgctgtcctctaagactgcggatgttacgaaagtctgggggatgggactcaacaaagattctcagcttggatttcacaggagccggaaagataaaacgaggggctacgagtatgtgttggagccctcacccgtctccctgcctctggacagacctcaggagacacgggtgctgcaggtctcctgcggccgagctcactctcttgtgttgactgacagggaaggagtcttcagcatgggaaacaattcttatgggcaatgtggaagaaaggtggtcgaaaatgaaatttacagtgaaagtcacagagtccacaggatgcaggacttcgatggccaggtggtccaggtcgcctgtggtcaggatcatagtctgttcctgacggataaaggagaagtctattcttgtggatggggtgctgatgggcaaacaggtctgggtcactacaatatcaccagctcgcccaccaagctgggtggagacctggcgggagtgaacgttatccaagttgccacctacggtgattgctgcctggccgtgtccgccgacggaggactttttggttggggaaactcggagtacctgcagctggcctctgtcactgactccacacaggtgaatgtgccccgctgcttacacttctcaggagtggggaaggtgcgacaggctgcatgcggtggcacgggctgtgcagtgttaaacggagaaggacatgtttttgtctggggctatggaattcttgggaaaggtccaaacctagtggaaagtgccgtccctgaaatgattccacccactctctttggcttgacggagttcaacccagaaatccaggtttcccgcatccgatgtggactcagccactttgctgcactgaccaacaaaggagagctgtttgtatggggcaagaacatccgagggtgcctgggaatcggtcgcctggaggaccagtatttcccatggagggtgacgatgcctggggagcctgtggacgtggcatgtggcgtggaccacatggtgaccctggccaagtcattcatctaaacctccctcacctgcttgggcggccccgtcccgggaaccactggcactccttggcagaggccagcgcgtggccagccccccggggttcttggatggtggtggcggaggaccctgcgtgcagtgtgacgctctgtcctgaatcccttagcgggtacctaccaggaggatcagggcaaggtccctctccagctgcaggtgaggcctgcggaactcagcttggatggcagcctttggtgggccgctgtggcccgcacgtctctgttctctccaagtaacatgcgacggtgtctggtgtcacgtctcgcctgagaagcccgtcttaggaaagcttagcttgaacacagtgctcgggaggtttctgctctgtctgtcatggcagtctcttggtttgtgtctggccaaggccatgcgtgtgcctcggaccgagccccagcttaggcgagggagtcaggctggcttcggccctcggttttcattcaggccaccctgctcatggcccttcctggccgcctgccacaccgcaagctcgctggggggacactagaagcaccgtggcctgggattccatctggagctgtccgcaggcaccagccccagcctcccaccacgctcactgcctggcttggaaaagttaagaagcccctcaggaagagaatcgaggctaagttcctctgcgccgagggccccgagcatatccgccaaggctcagctgcagtgccaggcggaggaggaagatccagaaattgtgaacaatgtttgatttagtagcgtgacttgcctttccctttaaaaacatcttttacaaatctgtcttggaataaagtctattttctgccttttggttttaagctctgaaaaaaaaaaaaa

SEQ ID NO: 393 - DNA, 743 bp, Homo sapiens
  CDS (202)..(639)
ctgtcgtcctgaccactcccaccgctgtgaaggtagagggaatcccagcctggatccaccacagccgtgtaaaacctgcagcacctgaaacctgggaggcaagaccaagcccagacgacccttgcagagtgaccctgaggaaaacgacaagccctgctccagtcacacccagaagctgactggtccacccacggccgaagcatgaggaagctcatcgcgggattcatttttcttaaattctggacttacacagtaagggcttcaactgaccttactcaaactggggactgttcccagtgtattcaacaggtcactgaagtaggacagcaaattaaagcaatctttctgttctatagttattatgaatgtatggaaacaataaaagaaacttgtttgtataatgccactcagtacaaggtatgtagcccgagaaatgaccgacctgatgtgtgttataacccatctgagccccctgcaaccaccgtttttgaaataagaactggccttttgctaggtgatacaagtaaaataataactagaacagaagaaaaagaaatccccaagcaaataactttaagatttgatgcttgtgcagccattaatagtaaaaagctagaaataggatggggatctcttaactgagaaaggagcttaagagtagaaaataaatttgtttgtcatgagtcatgggtttgtaaaaattgtgcctatcggccatgcgttatttaggctacttaaaaaaa

SEQ ID NO: 394 - DNA, 4631 bp, Homo sapiens
  CDS (641)..(2515)
cccccaacccctttcttctcttcaaccagtagcctccaccttcccatccctgctttggagaaggaggaaaacgcagcttgagatctactcgaagaactgaccctcagctctcacaggctgccgccgagctgcaagcatgccgccgctccactcaggtaaacttcggagtgagttacctgcacttggagaagggccttacctgagcgcgcctctgccaatggcagctcacctgagggagctccccagccaatcatcgcgcagctcgtccctcgggcttgtaccctttagtgaaagaattcagctccttgcgagaaagttacctgtggccgcccaagtccgccactttctgctctgtgtctgcccattgccacgatccaggaggactccgcgccgcccggccgcctccgagctcgggccccatgtgaggggcccccccttatcccacctttccggctaggtgagggcgcgagcgggcgagcgagcgagagtggtgaggggggacggaaaagcagaattacctgtagctcttgttctgccatctcgggcgctctcacacaccttcacctgcacagacttgaaagtccagtttcaccagaggctgaggctccaggaaaaggggagcaagctcattggatcaaacatgtcacaagagtcggacaataataaaagactagtggccttagtgcccatgcccagtgaccctccattcaatacccgaagagcctacaccagtgaggatgaagcctggaagtcatacttggagaatcccctgacagcagccaccaaggccatgatgagcattaatggtgatgaggacagtgctgctgccctcggcctgctctatgactactacaaggttcctcgagacaagaggctgctgtctgtaagcaaagcaagtgacagccaagaagaccaggagaaaagaaactgccttggcaccagtgaagcccagagtaatttgagtggaggagaaaaccgagtgcaagtcctaaagactgttccagtgaacctttccctaaatcaagatcacctggagaattccaagcgggaacagtacagcatcagcttccccgagagctctgccatcatcccggtgtcgggaatcacggtggtgaaagctgaagatttcacaccagttttcatggccccacctgtgcactatccccggggagatggggaagagcaacgagtggttatctttgaacagactcagtatgacgtgccctcgctggccacccacagcgcctatctcaaagacgaccagcgcagcactccggacagcacatacagcgagagcttcaaggacgcagccacagagaaatttcggagtgcttcagttggggctgaggagtacatgtatgatcagacatcaagtggcacatttcagtacaccctggaagccaccaaatctctccgtcagaagcagggggagggccccatgacctacctcaacaaaggacagttctatgccataacactcagcgagaccggagacaacaaatgcttccgacaccccatcagcaaagtcaggagtgtggtgatggtggtcttcagtgaagacaaaaacagagatgaacagctcaaatactggaaatactggcactctcggcagcatacggcgaagcagagggtccttgacattgccgattacaaggagagctttaatacgattggaaacattgaagagattgcatataatgctgtttcctttacctgggacgtgaatgaagaggcgaagattttcatcaccgtgaattgcttgagcacagatttctcctcccaaaaaggggtgaaaggacttcctttgatgattcagattgacacatacagttataacaatcgtagcaataaacccattcatagagcttattgccagatcaaggtcttctgtgacaaaggagcagaaagaaaaatccgagatgaagagcggaagcagaacaggaagaaagggaaaggccaggcctcccaaactcaatgcaacagctcctctgatgggaagttggctgccatacctttacagaagaagagtgacatcacctacttcaaaaccatgcctgatctccactcacagccagttctcttcatacctgatgttcactttgcaaacctgcagaggaccggacaggtgtattacaacacggatgatgaacgagaaggtggcagtgtccttgttaaacggatgttccggcccatggaagaggagtttggtccagtgccttcaaagcagatgaaagaagaagggacaaagcgagtgctcttgtacgtgaggaaggagactgacgatgtgttcgatgcattgatgttgaagtctcccacagtgaagggcctgatggaagcgatatctgagaaatatgggctgcccgtggagaagatagcaaagctttacaagaaaagcaaaaaaggcatcttggtgaacatggatgacaacatcatcgagcactactcgaacgaggacaccttcatcctcaacatggagagcatggtggagggcttcaaggtcacgctcatggaaatctagccctgggtttggcatccgctttggctggagctctcagtgcgttcctccctgagagagacagaagccccagccccagaacctggagacccatctcccccatctcacaactgctgttacaagaccgtgctggggagtggggcaagggacaggccccactgtcggtgtgcttggcccatccactggcacctaccacggagccgaagcctgagcccctcaggaaggtgccttaggcctgttggattcctatttattgcccaccttttcctggagcccaggtccaggcccgccaggactctgcaggtcactgctagctccagatgagaccgtccagcgttcccccttcaagagaaacactcatcccgaacagcctaaaaaattcccatcccttctttctcacccctccatatctatatctcccgagtggctggacaaaatgagctacgtctgggtgcagtagttataggtggggcaagaggtggatgcccactttctggtcagacacctttaggttgctctggggaaggctgtcttgctaaatacctccagggttcccagcaagtggccaccaggccttgtacaggaagacattcagtcaccgtgtaattagtaacacagaaagtctgcctgtctgcattgtacatagtgtttataatattgtaataatatattttacctgtggtatgtgggcatgtttactgccactggcctagaggagacacagacctggagaccgttttaatgggggtttttgcctctgtgcctgttcaagagacttgcagggctaggtagagggcctttgggatgttaaggtgactgcagctgatgccaagatggactctgcaatgggcatacctgggggctcgttccctgtccccagaggaagccccctctccttctccatgggcatgactctccttcgaggccaccacgtttatctcacaatgatgtgttttgcctgactttccctttgcgctgtctcgtgggaaaggtcattctgtctgagaccccagctccttctccagctttggctgcgggcatggcctgagctttctggagagcctctgcagggggtttgccatcagggccctgtggctgggtctgctgcagagctccttggctatcaggagaatcctggacactgtactgtgcctcccagtttacaaacacgcccttcatctcaagtggccctttaaaaggcctgccgccatgtgagagctgtgaacagctcagctctgagtcggcaggctggggcttcctcctgggccaccagatggaaagggggtattgtttgcctcactcctggatgctgcgttttaaggaagtgagtgagaaagaatgtgccaagatacctggctcctgtgaaaccagcctcaggagggaaactgggagagagaagctgtggtctcctgctacatgccctgggagctggaagagaaaaacactcccctaaacaatcgcaaaatgatgaaccatcatgggccactgttctctttgaggggacaggtttaggggtttgcgttcgcccttgtgggctgaagcactagctttttggtagctagacacatcctgcacccaaaggttctctacaaaggcccagatttgtttgtaaagcactttgactcttacctggaggcccgctctctaagggcttcctgcgctcccacctcatctgtccctgagatgcagagcaggatggagggtctgcttctagctcagctgtttctccttgaggttgcggaggaattgaattgaatgggacagagggcaggtgctgtggccaagaagatctccgagcagcagtgacggggcaccttgctgtgtgtcctctgggcatgttaacccttctgtggggccaaaggtttgcatcgtggatccagctgtgctccagtctgtcccctcctcctccactctgactgccacgccccggaccagcagcttggggaccctccagggtactaatggggctctgttctgagatggacaaattcagtgttggaaatacatgttgtactatgcacttcccatgctcctagggttaggaatagtttcaaacatgattggcagacataacaacggcaaatactcggactggggcataggactccagagtagg

SEQ ID NO: 395 - DNA, 1079 bp, Homo sapiens
  CDS (361)..(816)
tgtcgttgttctgagctatgtcttcaaccacctggcggcccagcatgattcctggactattgtaggggttgctgccctcatcctgttcctggtagcactgctggctcgtgtcctcgtcaaaagaaaaccaccccgggacccactgttctatgggtgaaccgtatctgaacaccgcatatgggcacatgatctgctactgggatggctctgctcattatctgatgtacctggtgatggtggcagccatagcatgggagtaagtcagttcacctggtgtgtgcctttgccaccttagcaaccgataagcgggttattcaagaagcccaagcgaaagacctgctgagaagaccatttgatttaatgttggttgtgtgtctcctcctggcaactggattttgcctgttcagaggtttgattgctttggattgcccatctgagctctgccgattatatacgcaatttcaagagccctatctaaaggatcctgctgcttatcctaaaattcagatgctggcatatatgttctattctgttccttactttgtgactgcactgtatggcttagtggttcctggatgttcctggatgcctgacatcacattgatacatgctggaggtctggctcaggctcagttttctcacattggtgcatctcttcatgctagaactgcttatgtctacagagtccctgaagaagcaaaaatcctttttttagcattaaacatagcatatggagttcttcctcagctcttggcctatcgttgtatctacaaaccagagttcttcataaaaacaaaggcagaagaaaaagtggaataaaaatattacttcatgttcctcctttctaaattactaacttttgttatactggtactgatattttgtcccatttcactctcttctcatacgtgagtacttaagaatatgtacattcttgctctgcactgtatgtgtgagctatatggtattgtgtaaattttttttgaaggaaaatggaaattcttgagaaacagtttgtttaaagaaatatattcaaaatcatttgtgaataaacttgatcatccatctcaaaaaaaaaa

SEQ ID NO: 396 - DNA, 967 bp, Homo sapiens
  CDS (152)..(409)
cccacgcgtccggaagaatcgggctagagcggcgaagctcgtatccaaggccagcgctgaggacgcagcatccgggtttcttcctggtaccgtccccaccagatgtccttcggccttctccgtgtgttctccattgtgatcccctttctctatgtcgggacactcattagcaagaactttgctgctctacttgaggaacatgacatttttgttccagaggatgatgatgatgatgactaacaggaattacagaaaggagaaagcactaactgaagaaatggtgatgctctcagtttctctgccttccctatcagcagaaaggctcggggaaggccctcagcctcccagtctggtgaagcttcctgtatggtccatgaccgtattccaccccaggctctgggaggctccctgagatgtgctgtccactaagcactgcacaaacaagcaatcaaattatgaataaacataataaatatcagccgtgcgtgactgagtgatggctgcagtttctcagtatccctaggttctagttggtgcagttgtctctgctgtcctttatttatgggagaaacataggcccaggctatccaggctgcagtggagcctggtgaactattctgggggccctgggaactattttcattgtttacaaaagcccaacagaaactgtgcattttcccttaagaaagcttcatgggctaactaaagcctcatgccattctgtgttcagtgccagtcatgacagctctgcttgttagcatactacttaaatataactagaatgattcaaaactcgggttctgtgatatgaggatatagataggttttcatctatttcctggcttataactcccaaaacccttgctttaggcttttgttataatgttgggcacttcgggcctcagaaaacagcaggctgtttctcagatcttctcctgacctcctttcacctgctggcttttctccc

SEQ ID NO: 397 - DNA, 1923 bp, Homo sapiens
  CDS (113)..(1372)
cctgagctctgtaacctgccctttctagatcactctctatgaaggcaagcacttcacagggcagaagctggaggtcttcggggactgtgacaacttccaggaccggggctttatgaaccgagtgaactccatccacgtggagagcggagcctgggtctgcttcaatcaccccgacttccggggccagcagttcatcttggagcacggcgactaccccgacttcttccgctggaacagccacagtgaccacatgggctcctgtcggcctgtaggaatgcacggagaacatttccgcctagaaatcttcgagggttgcaacttcacgggccagtgcctggagttcctggaggacagccccttcctccagagcaggggctgggtcaagaactgtgtgaacaccatcaaggtgtacggggacggagcgtgggtcctgtatgaggagcccaactaccacggccgcatgtacgtggtggagagtggcgacttccgcagcttctcggactgggaggcccacagcgcacgagtgcagtcgctccacaagatctgggggcaatttcccagaggagagtctgtaatctacgacctgcaagagaaaagggaagacaggctggctgaggacatctgcacccacagctctacagtccagactcaacccccagagatggctggctcatccccaccagggggccactttgtgccaaaccggagaaggaggggtgggggaggtggagaagccaagaacaaaaaatctatcaacctggaaagaggaagtaggagtcgggctccccgttccccgcgatggccgcgggccgcagtcgtacggagccgccgcgcggaccccggggcgcccctccctagcggggcgcagctccttcttgttccccgccctgccagcgggatggggggcggcgggtcggccctgagggtctgcgccgaccaccgcgggggcatcaactggctgagcctgagccccgacgggcagcgcctgctgacgggcagcgaggacggcacggcccggctctggagcaccgcggacggccagtgctgcgcgctcctggaagctcaccggccccagaccgcggaccccagctcctgcgcccgcagacccctttctagaagtccagcccccgctcatcccggcacactagcggaagagcgcttgtctgggcccagcatctggctgttgagcgcacggcagggcagggtgccttgtggcctctttgtggccaattgtgctcttctgctggcatttcctgttgacgactctcacagcaacagtagacgcttgttaagggccagcggtgcggagaagtgtgccgtcgtcacactatgttaccccacatacagacgtggaaacaggctgggagttaagtaattcgcccaggtcgcacagccagtgaggggtagatggcagtctgagccctctcattgctgtaaaccctgcctgcatgcctgttggtttctatttgtgccctgtactcactcaggaggtcagtgtgcctcgggtgcaccttcccctgggcctgtcccatgcactgtgaggtccctttcagctctggccctcctactgcccaggtagcacacgtagtcccctggatgagccgcgaggctttctgctgtgggtagttctttatcaccgcgggcttttccaccatcatcagtgaactctctgtggcctcgcccaggccttccaacttaggaattttcaaggacggggacagaggtcatctttctttatcctgagattctactgatacgctcaacttgcaaaagagtcattgtgagtgtgtgacagtccttttgtgtggatccccaaagaaagcaaggtgttgccagttcctttctcctgcaggattttttttttctatcagtgaaatattattaaaatgtcttaacatttgtttagtgccctaaaaaaaaaaa

SEQ ID NO: 398 - DNA, 307 bp, Homo sapiens
  CDS (18)..(149)
ttgtctctgatatttatatgccattatgtggcctctactgccttaggattctaatgttcccactaagatcagctaactcagttccactacagggtttaccaccatcatctctcgcaaacaaagacagccacttcagagctcctaggaaatagtggtgctcccatcatcattgcattccttaatgacatggtgaaaattaacaatggctaaggagcctttgtgttttctcctctacaatatgcccaggaatttctggcattttggccatcttatttataggctattactgaatttaagcctcatccta

SEQ ID NO: 399 - DNA, 1545 bp, Homo sapiens
  CDS (952)..(1134)
  misc_feature (1)...(1545): n = a,t,c or g
acagcaagatatgcagggcccctaacttcaaatagatgtagattttaaatgagcctctgtagtccattttatccacagaagttgcagatgcctatcttcctgttgtataacgtatcaggtcagggaatataatttgtaccaggtatgtcattntgctgttcagagagtcattaggttcctcccagaatatatgtgattgatatccctgnaggtaaaggctaaaggaaccatatggcacatgtntgcattccgtatgctatctgcccatccgtgcttaagctgtcattagcaacatctgtaccttacggaaatccagctgcgccgacgacggctgacggaattgtacttggggggaaaatctagcttagcgccattaacttgagacttagagtctatctaccaggacggatggaagctttcacaattagacgagacgacacgaatgctttattaaagtttaattttgaactcccaattagcgaaagtgcattacaaatcgattgcaatttcctagaaggtgcagcaagttctctgcctgcctgccacgtgcgagacgctccacagcgagcttccccagctccgggcagcagaaaggggatggttcagagccgatctccgcatcccaggaagtccctaaaatccgcgccagcccctcctcccgcagggcgggggcgtccacggcgcgaacccgccagaggtgtagggggaagtgtggggggctggtccgcagccttcgaggggtggggcgacaggagcgagcggccgggggaggagaaaaaggcgggcggcgggagagggggcctctattatctcggcttctcgggaggagcctcatctagtcagtcacgcagaagtttctctttcgctcttcgcgctacacacccagattggcttccagcgcgcaggtaaaacctggctgtgccctgttgaaatcaattctgttgcagtcatatgcggtggaatctgttcttcttttgcatcctacgtaaccagaccaagctgtgggcttctcaaggtagcctccaggatgcacagagtgagagaggatgcttttccctaaaccaggaacaaagtccagccctaaggagattggaccactcccgaccaatgagtttggccagggaggtcatgcactgattggctcagccctggatcagtctacttctcaaccaatcaaggtgctaaggaaataggattaccctaaacgatttaacacaccgggactcattcctgaagctggagatgctgtaacacaatcaaaactgtaaggcttaaaagaattaaagtaggaattgccgcaattcccttcctagacttattcccaaatatacttactatggactacctgcatacagcagccccttcacatatttttactgcctgtcataaagtagtctgggttacatttaaagaagctgccagcacttaatgcatagaagtactaaaaatttgttactgatgtttgaaaaatatagaaaattaaaagcggaatggctgagtgtagtggcttacacctgcagtccctacatgttaagaggccaaggg

SEQ ID NO: 400 - DNA, 2114 bp, Homo sapiens
  CDS (188)..(1630)
tttcgtggacgggagggcacgggagtgcagcccgcccatgtggctactggaggtcacgttccctaactgatcccttggttctctcgggtggagccttcagcgtgcacggcggggtttgactttgccaccgtctctcttctgggttccaataaagttttcctcttcctctcctcgtacggagttcaagatggcggcctcctggtcgctcttggttaccctgcgccccttagcacagagcccgctgagagggagatgtgttgggtgcggggcctgggccgccgctctcgctcctctggccaccgcccctgggaagcccttttggaaagcctatacggttcagacatccgagagcatgaccccaactgccacttcagagacttatttgaaagctttggccgtttgccatggacctctggaccactatgattttctgatcaaagctcatgagctaaaggatgatgaacatcaaagaagagtcatacagtgtttgcagaaattacacgaggaccttaaaggatacaatatagaggcagaaggccttttttcaaagcttttttcaaggagcaaacctccaaggggcctgtatgtttatggagatgttggtacaggaaaaacaatggtgatggacatgttttatgcttatgtggaaatgaagaggaaaaaacgggttcattttcatggtttcatgctagatgtgcacaaaagaatacatcgccttaaacagagtttgccaaaaaggaaaccaggattcatggctaaatcatatgacccaatagctcccatagccgaagaaatcagcgaagaagcatgtctcctatgttttgatgaatttcaggtcactgacattgctgatgccatgattctgaaacagctttttgaaaatctgttcaaaaacggggtcgtcgttgtggcaacatccaacaggccaccggaagatctctataaaaatggactccaaagagctaactttgtaccattcatagcagtcttgaaggaatattgtaatacagtccagctagattctgggatagattaccggaaaagggaacttcctgctgcaggaaaactctactacctcacaagtgaagctgatgtggaggctgtcatggataagttgtttgatgagctggctcagaaacaaaatgatttaactagaccaaggattctaaaagtgcaaggcagagagctgcgcctgaataaagcctgtggaaccgttgccgactgcacatttgaagagctgtgtgagagaccacttggagccagtgactatttggaactatcaaagaattttgatacaatatttttacgaaacattccgcaatttactctggcaaacaggactcaaggtcgaagattcataactctcatcgataacttttatgatctcaaggtgcgtataatttgctctgcgtcgactcctatatcaagcttatttttgcatcaacatcatgacagtgagttggagcaaagcagaatactgatggatgatttggggctgagccaggattcagcagaaggactctccatgtttaccggagaagaggaaatctttgcatttcagcgcacaatttcccgactcacggaaatgcagactgaacagtactggaatgaaggagacagaaccaagaagtaactgccacttttgcataaataaaactctagacaaatggttaacgcaggcagaactccttattgtgggacttgaaggaatcattttctcatcattaattatgcactttgtcctctggaccattttaatctaaaattgctctcaaggatctagtggattagtaagttaaacacttaacattttttaggtctgctttttcttatttggccttatttctgcaccatgaaattaaaatcatctcattcctgaagatgaatgtaggaccagacattttagcttcacattaaaccacctgaatgaaccttgaatgcacaagtaaatgcaagacgtctggataccttcaagctttggctgcatggtggtggcatgttagaaatacatcttttataatgggggaagaatgccctatgtttcaattcaaaacaaagacagttttccaacccgatataaactaaaagggataatattttagaaaaaaaaaaaa

SEQ ID NO: 401 - DNA, 1973 bp, Homo sapiens
  CDS (188)..(1489)
tttcgtggacgggagggcacgggagtgcagcccgcccatgtggctactggaggtcacgttccctaactgatcccttggttctctcgggtggagccttcagcgtgcacggcggggtttgactttgccaccgtctctcttctgggttccaataaagttttcctcttcctctcctcgtacggagttcaagatggcggcctcctggtcgctcttggttaccctgcgccccttagcacagagcccgctgagagggagatgtgttgggtgcggggcctgggccgccgctctcgctcctctggccaccgcccctgggaagcccttttggaaagcctatacggttcagacatccgagagcatgaccccaactgccacttcagagacttatttgaaagctttggccgtttgccatggacctctggaccactatgattttctgatcaaagctcatgagctaaaggatgatgaacatcaaagaagagtcatacagtgtttgcagaaattacacgaggaccttaaaggatacaatatagaggcagaaggccttttttcaaagcttttttcaaggagcaaacctccaaggggcctgtatgtttatggagatgttggtacaggaaaaacaatggtgatggacatgttttatgcttatgtggaaatgaagaggaaaaaacgggttcattttcatggtttcatgctagatgtgcacaaaagaatacatcgccttaaacagagtttgccaaaaaggaaaccaggattcatggctaaatcatatgacccaatagctcccatagccgaagaaatcagcgaagaagcatgtctcctatgttttgatgaatttcaggtcactgacattgctgatgccatgattctgaaacagctttttgaaaatctgttcaaaaacggggtcgtcgttgtggcaacatccaacaggccaccggaagatctctataaaaatggactccaaagagctaactttgtaccattcatagcagtcttgaaggaatattgtaatacagtccagctagattctgggatagattaccggaaaagggaacttcctgctgcaggaaaactctactacctcacaagtgaagctgatgtggaggctgtcatggataagttgtttgatgagctggctcagaaacaaaatgatttaactagaccaaggattctaaaagtgcaaggcagagagctgcgcctgaataaagcctgtggaaccgttgccgactgcacatttgaagagctgtgtgagagagtgcgtataatttgctctgcgtcgactcctatatcaagcttatttttgcatcaacatcatgacagtgagttggagcaaagcagaatactgatggatgatttggggctgagccaggattcagcagaaggactctccatgtttaccggagaagaggaaatctttgcatttcagcgcacaatttcccgactcacggaaatgcagactgaacagtactggaatgaaggagacagaaccaagaagtaactgccacttttgcataaataaaactctagacaaatggttaacgcaggcagaactccttattgtgggacttgaaggaatcattttctcatcattaattatgcactttgtcctctggaccattttaatctaaaattgctctcaaggatctagtggattagtaagttaaacacttaacattttttaggtctgctttttcttatttggccttatttctgcaccatgaaattaaaatcatctcattcctgaagatgaatgtaggaccagacattttagcttcacattaaaccacctgaatgaaccttgaatgcacaagtaaatgcaagacgtctggataccttcaagctttggctgcatggtggtggcatgttagaaatacatcttttataatgggggaagaatgccctatgtttcaattcaaaacaaagacagttttccaacccgatataaactaaaagggataatattttagaaaaaaaaaaaa

SEQ ID NO: 402 - DNA, 1504 bp, Homo sapiens
  CDS (44)..(931)
gcgagactgcgtctcaaggaacaacaacaacagcaaaaaagaaatgggacagaaagttgtaaggccagatgtgggtgactcaccgactcgcagcgatgtcgaggtcccccgaatccactgggacctgtccacggagcgggtcctcctgatggagtttgtggatggcgggcaggtcaatgacagagactacatggagaggaacaagatcgacgtcaatgagatctcacgccacctgggcaagatgtatagtgagatgatcttcgtcaatggcttcgtgcactgcgatccccaccccggcaatgtactggtgcggaagcaccccggcacgggaaaggcggagattgtcctgttggaccatgggctttaccagatgctcacggaagaattccgcctgaattactgccacctctggcagtctctgatctggactgacatgaagagagtgaaggagtacagccagcgactgggagccggggatctctaccccttgtttgcctgcatgctgacggcgcgatcgtgggactcggtcaacagaggcatcagccaagctcccgtcactgccactgaggacttagagattcgcaacaacgcggccaactacctcccccagatcagccatctcctcaaccacgtgccgcgccagatgctgctcatcttgaagaccaacgacctgctgcgtggcattgaggccgccctgggcacccgcgccagcgccagctcctttctcaacatgtcacgttgctgcatcagagcgctagctgagcacaagaagaagaatacctgttcattcttcagaaggacccagatctctttcagcgaggccttcaacttatggcagatcaacctccatgagctcatcctgcgtgtgaaggggttgaagctggctgaccgggtcttggccctaatatgctggctgttccctgctccactctgagtggaattgctctccctgccccattctggtgtctttccactcctcagcccctcatcttgcctccacccagctgctccatttttgccacatcgtggcccgcagccccagagtcactgtccatgtcaccatcctcctcctcctttggaatcctctccgcacactgtggcccttgtctcagggcccacaagctgaactgtggcatagctctctcttcttctccaagaagactcagcagcctacattcccattcctggtatgtgccattgggttggatgtccccactacttccgttaacccttcccattgtcaagatgtgccacgggtgccactgggggcacactgaacttgtagggagtgtgattttgttggaggtgcacatggtctctgaatttgacagagaacaccttccctttccttgccatgtcaccctccagaggaagtcacacctcagcgaggtggtttggcatctggggccaactccattacagctatgagctcactgctgtcagtgacgtttggtgttttctgtactgtgtttcaataaaaactccttcaaggttaaaaaaaaaa

SEQ ID NO: 403 - DNA, 1300 bp, Homo sapiens
  CDS (188)..(913)
cgttggtccacatcctagcagttctcttggtgttcctgcgtgatcaaaggatggctgccacaccccagcctgctgacctcagccctggcgtgggcataggagggtctgcgtggctgagcatccagtgtccttcgtactgccactgacagcctcaggcctgatttccagcactgtctgtccaggagcaatgggagcaagagtcactccacaagactctggaggcctgataggtatcgagaaccttccctgcgaacttcagaggaacttccagctgatgcgagagctggaccagaggacggaagataagaaagcagagattgacatcctggctgcagagtacatctccacggtgaagacgctgtctccagaccagcgcgtggagcgcctgcagaagatccagaacgcctacagcaagtgcaaggaatacagtgacgacaaagtgcagctggccatgcagacctacgagatggtggataaacacattcgaaggcttgatgcagacctggcgcgctttgaagcagatctgaaggacaagatggagggcagtgattttgaaagctccggagggcgagggttaaaaaaaggccggggtcagaaagaaaaaagagggtcccggggccgaggcaggaggacatcagaggaagacacaccaaagaaaaagaagcacaaaggagggtctgagttcactgacaccatcctgtccgtgcacccctctgatgtgctggacatgcccgtggacccaaacgaacccacgtactgcctgtgccaccaggtctcctatggggagatgattggctgtgacaatccagactgtccaattgagtggtttcactttgcctgcgtggaccttaccacgaaacccaaaggaaaatggttctgtccacggtgtgtccaggaaaagaggaagaagaagtaggaggagctgtgtgcccggatccgaggagcaagttaatctgtcccttcattcgtgtcgcaatatttcccttccttttaaaactaccttgttcggttgatacttagtaactccgtggccagttgaagcgctggatgtttcctagaacaagaaccaccaaagcctgttcgcacagaagggcgaccttgcagggactcgccgccgcgacctcagtgtggcttttacaggactccccccgagcatcagcagggaccccggcggacgtgggcgggcgcgcgtgagctcgggctgcccggccgggcgtgcgggcggggacatggtaacctggtccacggagggcggccgccaccctcgcgtagctttcctgtggttttccaggactgtccg

SEQ ID NO: 404 - DNA, 933 bp, Homo sapiens
  CDS (155)..(694)
ttcggcacgaggcggtttcctgcttcaacagtgcttgaacggaacccggtgctcgacccctccgacccccgccggccgcttcgagcctgagccctttgcaacttcgtcgttccgccgctccagcgtcgccaccgcgcctcgccccgccgccaccatgaccaccgcgtctccctcgcaagtgcgccagaactaccaccaggacgcggaggctgccatcaaccgccagatcaacctggagttgtatgcctcctacgtctatctgtctatgtcttgttattttgaccgagatgatgtggctctgaagaactttgccaaatactttctccaccaatctcatgaggagagggagcatgccgagaaactgatgaagctgcagaaccagcgaggtggccgaatcttcctgcaggatataaagaaaccagaccgtgatgactgggagagcgggctgaatgcaatggagtgtgcactgcacttggaaaagagtgtgaatcagtcactactggaactgcacaaactggctactgacaagaatgatccccacttatgtgacttcattgagacgtattatctgagtgaacaggtgaaatccattaaagaactgggtgaccacgtgaccaacttacgcaagatgggtgcccctgaagctggcatggcagaatatctctttgacaagcacaccctgggacacgggggatgagagctaagctgacttccccaaagccacgtgactttactggtcactgaggcagtgcatgcatgtcaggctgccttcatcttttctataagttgcaccaaaacatctgcttaggtctttaatttgacccatttcttccaattaaaaaatttgggtcccccgaaaacagggctgtgattggtgggaggtggtttctttaacaggcgggtttgtaccggaaggccctgtagtgttacgtc

SEQ ID NO: 405 - DNA, 2069 bp, Homo sapiens
  CDS (225)..(1856)
aaggatccttaatttattaatccccccccccccccccccggccgtcgccaggcgctggccgtggtgctgattctgtcaggcgctggcggcggcagcggcggtgacggctgcggccccgctccctctacccggccggacccggctctgcccccgcgcccaagccccaccaagccccccgccctcccgccgcggtcccagcccagggcgcggccgcaaccagcaccatgcgcccggtagccctgctgctcctgccctcgctgctggcgctcctggctcacggactctctttagaggccccaaccgtggggaaaggacaagccccaggcatcgaggagacagatggcgagctgacagcagcccccacacctgagcagccagaacgaggcgtccactttgtcacaacagcccccaccttgaagctgctcaaccaccacccgctgcttgaggaattcctacaagaggggctggaaaagggagatgaggagctgaggccagcactgcccttccagcctgacccacctgcacccttcaccccaagtccccttccccgcctggccaaccaggacagccgccctgtctttaccagccccactccagccatggctgcggtacccactcagccccagtccaaggagggaccctggagtccggagtcagagtcccctatgcttcgaatcacagctcccctacctccagggcccagcatggcagtgcccaccctaggcccaggggagatagccagcactacaccccccagcagagcctggacaccaacccaagagggtcctggagacatgggaaggccgtgggttgcagaggttgtgtcccagggcgcagggatcgggatccaggggaccatcacctcctccacagcttcaggagatgatgaggagaccaccactaccaccaccatcatcaccaccaccatcaccacagtccagacaccaggcccttgtagctggaatttctcaggcccagagggctctctggactcccctacagacctcagctcccccactgatgttggcctggactgcttcttctacatctctgtctaccctggctatggcgtggaaatcaaggtccagaatatcagcctccgggaaggggagacagtgactgtggaaggcctgggggggcctgacccactgcccctggccaaccagtctttcctgctgcggggccaagtcatccgcagccccacccaccaagcggccctgaggttccagagcctcccgccaccggctggccctggcaccttccatttccattaccaagcctatctcctgagctgccactttccccgtcgtccagcttatggagatgtgactgtcaccagcctccacccagggggtagtgcccgcttccattgtgccactggctaccagctgaagggcgccaggcatctcacctgtctcaatgccacccagcccttctgggattcaaaggagcccgtctgcatcgctgcttgcggcggagtgatccgcaatgccaccaccggccgcatcgtctctccaggcttcccgggcaactacagcaacaacctcacctgtcactggctgcttgaggctcctgagggccagcggctacacctgcactttgagaaggtttccctggcagaggatgatgacaggctcatcattcgcaatggggacaacgtggaggccccaccagtgtatgattcctatgaggtggaatacctgcccattgagggcctgctcagctctggcaaacacttctttgttgagctcagtactgacagcagcgggacagctgcaggcatggccctgcgctatgagggtgagcctgctggggcctcactgggggtggcgggtccacggggatgggctcgggcctagggtctttctcccacaccctacccctctctgcctccatgctgtcactccttccaagtcagcccctgctcactcagtacttaggccccctttccctgcccctctctttgggtccgggatccctaccacagctttgcaggaaacctctgcctggacccaggccctatggtccaagggaataaattctccagattttgaaaaacaaaaaaaaaa

SEQ ID NO: 406 - DNA, 741 bp, Homo sapiens
  CDS (440)..(685)
atgagggggggatgggggggggggttttttggcgaaagagaaataaagatttttttggggggggggggaagcggggaggggtctcttggggggtttttttaagtaaagaagggggaaaaataaaaagggggttttaccggttttgtgccgggcctcccccaaatgggaactttttttaaattttaagggttttgagtttttggggaaccctcccctggggtacatcctcccctgcccattcaacctgggccccgggtttggggcaggtgtgcatatcaaagtgcccaacctgggcaaacattaaaaatttttggaggtgtttaaacgggttgggctttaaaaaggaggcccaggcggtgtggacccggcttcggtggggggggtttttaacgtttccaacgttggccccctggggttttcaaaggtggaattggtgcaaatggtggtggacggaattaaacttttccttcaaaaggaacaacgggtggaacagggccaggccatttacgaccttatggctgcccaaaaaaaaaagccgggccccccccgaccccagccctggtgttttttaaattattgcctgggcagggccccccatgccccccttatttttcccgtttggggagcccttaacccttgtgtaaaaacttccgtcccccctgggaaaggttttttttttgaagggtaaaaaactgctgatggtgaaataaaatagggttttggccccccaaaaaaaaaaaa

SEQ ID NO: 407 - DNA, 3480 bp, Homo sapiens
  CDS (712)..(2301)
ccggaattttcgggtcgacgatttcgtgtgccagtgctgcgcgggaaggcaccaccaccacagccgccgccgctggccagggtgctggacaagacgggcccgtcggccacctcgccagctcaggcacccgctgcagccgtcgctgtctcctcccagaccggtccccatggaggagatggaagaggagttgaaatgccccgtgtgcggctccttctatcgggagcccatcatcctgccctgctctcacaatttgtgtcaggcgtgcgcccgcaacatcctggtgcagaccccagagtctgaatccccccagagccatcgggccgcgggctccggggtctccgactatgactatctggacctggacaagatgagcctatacagcgaggcggacagcggctatggctcctacggggggttcgccagcgcccccactaccccgtgccagaagtcccccaacggcgtccgccgtgtttcccccggctatgccgccaccggccacccagcttgtcaccggcccctggggcccggtgcccccgcaactcctgtatcacctgcccccagtgtcaccgcagcctcatcctggatgaccgggggctccgcggcttccccaagaatcgcgtactggaaggggtaattgaccgctaccagcagagcaaagccgcggccctcaagtgccagctctgcgagaaggcgcccaaggaagccaccgtcatgtgcgaacagtgcgatgtcttctactgcgatccgtgccgcctgcgctgccacccgccccgggggcccctagccaagcaccgcctggtgcccccggcccagggtcgtgtgagccggaggctgagcccacgcaaggtctccacctgcacagaccacgagctggagaaccacagcatgtactgcgtgcaatgcaagatgcccgtgtgctaccagtgcttggaggagggcaaacactccagccacgaagtcaaggctctgggggccatgtggaaactacataagagccagctctcccaggcgctgaacggactgtcagacagggccaaagaagccaaggagtttctggtacagctgcgcaacatggtccagcagatccaggagaacagtgtggagtttgaagcctgtctggtggcccaatgtgatgccctcatcgatgccctcaacagaagaaaagcccagctgctggcccgcgtcaacaaggagcatgagcacaagctgaaggtggttcgagatcagatctctcactgcacagtgaaattgcgccagaccacaggtctcatggagtactgcttggaggtgattaaggaaaatgatcctagtggttttttgcagatttctgacgccctcataagaagagtgcacctgactgaggatcagtggggtaaaggcacactcactccaaggatgaccacggactttgacttgagtctggacaacagccctctgctgcaatccatccaccagctggatttcgtgcaagtgaaagcttcctctccagtcccagcaacccctatcctacagctggaggaatgttgtacccacaacaacagcgctacgttgtcctggaaacagccacctctgtccacggtgcccgccgatggatacattctggagctggatgatggcaacggtggtcaattccgggaggtgtatgtggggaaggagacaatgtgcactgtggatggtcttcacttcaacagcacatacaacgctcgggtcaaggccttcaacaaaacaggagtcagcccgtacagcaagaccctggtcctccaaacgtctgaggtggcctggtttgctttcgaccctggctcggcgcactcggacatcatcctctccaatgacaacctgacagtgacctgtagtagctatgatgaccgggtggtgctagggaagactggcttctccaagggcatccactactgggagctcacggtagatcgctatgacaaccaccctgatcctgcctttggtgtggctcgcatggacgtgatgaaggatgtgatgttaggaaaagacgacaaagcttgggcaatgtatgtggacaataaccggagctggttcatgcacaacaactcgcacaccaacagaactgagggagggatcacaaaaggggccacaattggggtcctcctcgacttaaatagaaaaaacttgacattttttatcaacgatgaacaacaaggtcccatagcatttgataacgtggagggcctcttcttccctgcggtcagcctgaacaggaacgtgcaggtcacgctgcacaccgggctcccagtccccgacttctactccagcagagcatcaatagcctaaggatgtgccgtggaggcgccagctgcctgttcttacctccgcctgcgagagccacagcaaggagctcagccagccgtggtggggtgcagagttggcaggagtgggagaaggaggagagaaaagctggtcctctgcagtctttacacccacagctctgcccttttccctttcaacctctcctccgctgtcatgcctgcttccgcttccatgtccaacaattctaaccaacaaaggacctagacagcccaccaagtcacttggttcccactcccagattttgcttttatttaacttaattttttatgtaggtgagttatattttctttcttttctgatcaggttattggtgacttactggactggcaccgccaggagaaaattctcctgctaactttttttcttaagctttctgtcaaacaatgaggttgtagggggaggtagggaagaatgagctgaatttgtagcatacagcttacctgctagaatgttcttaccctcttacctctcctgtagcgttagctctgcagagctaagctttgggagaatgaatctatcactgagaagttttactactcattgaagcacaaaaatatccgctacacaggttcacatcagggtaggatcgttaggatggctctataattaggacaggccagaaccctggccactgtataaaattggaaagtctctaagacacaggcaaaccaggggacttaatgatttggttcgtttatttaataaaagcttttaattgagaacctactattgaccaggcactgttcaagacactagaacattatgttctagacactgtggggacacagtggtgaacagacaggcatggtctctgcccttcggagcttatattccagtaggagaaaaagcaaaaataaaataattataaatggtcatatgtactagaaaggaaatgggcaagggtcaaagagactcatgggcaagatctttcaggcttcctagaatgatgctaaaaatccacacattctggccatagcaccagaaatgtaccaactcaatgccttttcagctgcactatttaattatggtacctgctgccactcatcacagagcccttcttggtagaaatgatgtcagcattcttatttgctgatgctgctatgataccacgccttaaaaattgacagttgaaaaaaaaaa

SEQ ID NO: 408 - DNA, 687 bp, Homo sapiens
  CDS (22)..(489)
aagcttgcggccgccgccgcgatgtttccccgcgagaagacgtggaacatctcgttcgcgggctgcggcttcctcggcgtctactacgtcggcgtggcctcctgcctccgcgagcacgcgcccttcctggtggccaacgccacgcacatctacggcgcctcggccggggcgctcacggccacggcgctggtcaccggggtctgcctgggtgagcggggccgggggcggcaggcggggggctggcgggaaggccgtgcggggccgggggatggtctccgtgagcggaggggccccgcggcgagtcggtgggtaccgtggggagggttccggtccgcgcctggggaacccggcgaggatccaatccgggtcgctggcctgggggcggggcctggtttgttttgctccgagggtgcccggggcccgcctgtcgggcgcaaaggtttgggggcgggcaggtgcagcaaaagctgcttaattggacagaaaaagtaactcgtgggcgggaccgtgagaatccgaggagggacctaagtcaccccgtggccctggatattacaaccggtgccagcggtcggtcacagtgtcctgggcttccgcagttgcaggctgctatcagggggcctgggcatggggtagccccttgagaggcgtctgggaaccgtgacctggtcctttccaaaggccccg

SEQ ID NO: 409 - DNA, 1891 bp, Homo sapiens
  CDS (20)..(1621)
tttaaatcagagggattgaatgagggtgctttgtgccttccctgaagccatgccctccagcaactcccgcccccccgcgtgcctagccccgggggctctctacttggctctgttgctccatctctccctttcctcccaggctggagacaggagacccttgcctgtagacagagctgcaggtttgaaggaaaagaccctgattctacttgatgtgagcaccaagaacccagtcaggacagtcaatgagaacttcctctctctgcagctggatccgtccatcattcatgatggctggctcgatttcctaagctccaagcgcttggtgaccctggcccggggactttcgcccgcctttctgcgcttcgggggcaaaaggaccgacttcctgcagttccagaacctgaggaacccggcgaaaagccgcgggggcccgggcccggattactatctcaaaaactatgaggatgacattgttcgaagtgatgttgccttagataaacagaaaggctgcaagattgcccagcaccctgatgttatgctggagctccaaagggagaaggcagctcagatgcatctggttcttctaaaggagcaattctccaatacttacagtaatctcatattaacagagccaaataactatcggaccatgcatggccgggcagtaaatggcagccagttgggaaaggattacatccagctgaagagcctgttgcagcccatccggatttattccagagccagcttatatggccctaatattgggcggccgaggaagaatgtcatcgccctcctagatggattcatgaaggtggcaggaagtacagtagatgcagttacctggcaacattgctacattgatggccgggtggtcaaggtgatggacttcctgaaaactcgcctgttagacacactctctgaccagattaggaaaattcagaaagtggttaatacatacactccaggaaagaagatttggcttgaaggtgtggtgaccacctcagctggaggcacaaacaatctatccgattcctatgctgcaggattcttatggttgaacactttaggaatgctggccaatcagggcattgatgtcgtgatacggcactcattttttgaccatggatacaatcacctcgtggaccagaattttaacccattaccagactactggctctctctcctctacaagcgcctgatcggccccaaagtcttggctgtgcatgtggctgggctccagcggaagccacggcctggccgagtgatccgggacaaactaaggatttatgctcactgcacaaaccaccacaaccacaactacgttcgtgggtccattacactttttatcatcaacttgcatcgatcaagaaagaaaatcaagctggctgggactctcagagacaagctggttcaccagtacctgctgcagccctatgggcaggagggcctaaagtccaagtcagtgcaactgaatggccagcccttagtgatggtggacgacgggaccctcccagaattgaagccccgcccccttcgggccggccggacattggtcatccctccagtcaccatgggcttttttgtggtcaagaatgtcaatgctttggcctgccgctaccgataagctatcctcacactcatggctaccagtgggcctgctgggctgcttccactcctccactccagtagtatcctctgttttcagacatcctagcaaccagcccctgctgccccatcctgctggaatcaacacagacttgctctccaaagagactaaatgtcatagcgtgatcttagcctaggtaggccacatccatcccaaaggaaaatgtagacatcacctgtacctatataaggataaaggcatgtgtatagagcaaaaaaaaaaaaa

SEQ ID NO: 410 - DNA, 1967 bp, Homo sapiens
  CDS (25)..(1659)
atcttctcccgcgcacacacggccatggcggaggcctcctcgctggggaggcagagtcctcgcgtggtctcctgcctcgagcacagcctgtgcccaggggagccgggcttgcagacaacagcagtggtgtccatgggctctggagaccatcagttcaacctcgcagagatcctgtcacagaactacagtgttaggggggagtgcgaggaggcctcgaggtgcccagacaagcccaaggaggagctggagaaggacttcatctcccagagcaacgacatgccctttgatgagctgcttgcgctctatggctacgaggcgtcagaccccatttcagaccgggagagtgagggtggtgacgtggccccgaacctcccagacatgaccctggacaaagaacaaatagcgaaggatttgctttcaggggaagaagaggaagagacgcaatcatctgctgacgacctcaccccgtccgtgacctcccacgaggcctccgacctcttccctaaccggagtggatctcgtttcctggctgatgaagacagagagcctggctcttctgcctcctccgacaccgaggaggactctcttcctgccaacaaatgtaagaaggagatcatggtgggacctcagttccaagctgacctcagcaacctgcacttgaaccggcactgtgagaagatctacgagaacgaagaccagctgctctgggaccccagcgtcctccctgagagggaggtggaggagttcctgtacagggcggtgaagcggcgttggcacgagatggccgggcctcagctcccagagggagaagccgtgaaagacagtgagcaggcgctgtacgagttggtgaaatgcaacttcaatgtggaggaggccctgcgaaggctgcggttcaacgtgaaggtgatccgagatgggctctgtgcttggagtgaagaggagtgcaggaactttgagcacggcttccgtgtgcatggaaagaactttcacctgatccaggccaacaaggtgcgcacacggtcagtgggcgagtgtgtcgagtactactacctgtggaagaagtcggagcgctacgactacttcgcccagcagacgcggctgggccggaggaagtacgtcccgtccggaaccacggacgcagaccaggacctggatggcagcgaccccgatggccccggccgtccgcgcccggagcaagacaccctgactgggatgcgcacagatccactgagcgtggatggcacggccggtggtctcgatgagcccggagtggcctctgatggactcccgtcctcggagccagggccgtgttccttccagcagctggatgagtcccccgctgtacccctgtcccatcggcccccagccctggccgacccagcctcataccagccagctgtcactgctccggagccagacgccagcccaaggctggccgtggacttcgccctgcccaaggagctgcccctcatctccagccatgtggacctcagcggggatccggaggagactgtggccccagcacaggtggctttgtcggtcaccgagtttggactcatcggcattggggacgtgaaccccttcctggccgcccaccccacgtgcccggcccccgggctacactcggagcccctgtcacactgtaacgtgatgacctgctgactcctggccgcgggcggcgtatgcggcccagactggacttagcgctgccgctgggcccgcctctgtcagtcttcctgaccccttccccaccccccgggccttggggtagcacctccttctgcttcagaacacgtcaggactggggtgaggtggctgggccgtgagcccttgcccctgtccacacagaatggacccacggccccacccagcgccgtcagcgcccggcactgccacccgggtccgggccgctgcctgcacgtgggatccgtcgggcagccggggacagaagagaccccgccgttggg

SEQ ID NO: 411 - DNA, 3571 bp, Homo sapiens
  CDS (260)..(3568)
ggaattcccgggtcgacgatttcgtaggccccgggcgcggcgcaggctccaaagaagaagaaaccaaggcccagagagggaggcccaggtgcagggagcaggcgagggaaggatccgtacaggggcccaacactactccaccaaccgaagcccccaaaaggagcccggtgatgctgcgaaggctgtgaacaggggaggcggcactgtgggggctgccggcagccggggctggggagagacatgtggacacgtggcctctatggctcccgcctgccagatcctccgctgggccctcgccctggggctgggcctcatgttcgaggtcacgcacgccttccggtctcaagatgagttcctgtccagtctggagagctatgagatcgccttccccacccgcgtggaccacaacggggcactgctggccttctcgccacctcctccccggaggcagcgccgcggcacgggggccacagccgagtcccgcctcttctacaaagtagcctcggccagcacccacttcctgctgaacctgacccgcagctcccgtctactggcagggcacgtctccgtggagtactggacacgggagggcctggcctggcagagggcggcccggccccactgcctctacgctggtcacctgcagggccaggccagcagctcccatgtggccatcagcacctgtggaggcctgcacggcctgatcgtggcagacgaggaagagtacctgattgagcccctgcacggtgggcccaagggttctcggagcccggaggaaagtggaccacatgtggtgtacaagcgttcctctctgcgtcacccccacctggacacagcctgtggagtgagagatgagaaaccgtggaaagggcggccatggtggctgcggaccttgaagccaccgcctgccagacccctggggaatgaaacagagcgtggccagccaggcctgaagcgatcggtcagccgagagcgctacgtggagaccctggtggtggctgacaagatgatggtggcctatcacgggcgccgggatgtggagcagtatgtcctggccatcatgaacattgttgccaaacttttccaggactcgagtctgggaagcaccgttaacatcctcgtaactcgcctcatcctgctcacggaggaccagcccactctggagatcacccaccatgccgggaagtccctagacagcttctgtaagtggcagaaatccatcgtgaaccacagcggccatggcaatgccattccagagaacggtgtggctaaccatgacacagcagtgctcatcacacgctatgacatctgcatctacaagaacaaaccctgcggcacactaggcctggccccggtgggcggaatgtgtgagcgcgagagaagctgcagcgtcaatgaggacattggcctgccacaagcgttcaccattgcccacgagatcgggcacacattcggcatgaaccatgacggcgtgggaaacagctgtggggcccgtggtcaggacccagccaagctcatggctgcccacattaccatgaagaccaacccattcgtgtggtcatcctgcaaccgtgactacatcaccagctttctagactcgggcctggggctctgcctgaacaaccggccccccagacaggactttgtgtacccgacagtggcaccgggccaagcctacgatgcagatgagcaatgccgctttcagcatggagtcaaatcgcgtcagtgtaaatacggggaggtctgcagcgagctgtggtgtctgagcaagagcaaccggtgcatcaccaacagcatcccggccgccgagggcacgctgtgccagacgcacaccatcgacaaggggtggtgctacaaacgggtctgtgtcccctttgggtcgcgcccagagggtgtggacggagcctgggggccgtggactccatggggcgactgcagccggacctgtggcggcggcgtgtcctcttctagtcgtcactgcgacagccccaggccaaccatcgggggcaagtactgtctgggtgagagaaggcggcaccgctcctgcaacacggatgactgtccccctggctcccaggacttcagagaagtgcagtgttctgaatttgacagcatccctttccgtgggaaattctacaagtggaaaacgtaccggggagggggcgtgaaggcctgctcgctcacgtgcctagcggaaggcttcaacttctacacggagagggcggcagccgtggtggacgggacaccctgccgtccagacacggtggacatttgcgtcagtggcgaatgcaagcacgtgggctgcgaccgagtcctgggctccgacctgcgggaggacaagtgccgagtgtgtggcggtgacggcagtgcctgcgagaccatcgagggcgtcttcagcccagcctcacctggggccgggtacgaggatgtcgtctggattcccaaaggctccgtccacatcttcatccaggatctgaacctctctctcagtcacttggccctgaagggagaccaggagtccctgctgctggaggggctgcctgggaccccccagccccaccgtctgcctctagctgggaccacctttcaactgcgacaggggccagaccaggtccagagcctcgaagccctgggaccgattaatgcatctctcatcgtcatggtgctggcccggaccgagctgcctgccctccgctaccgcttcaatgcccccatcgcccgtgactcgctgcccccctactcctggcactatgcgccctggaccaagtgctcggcccagtgtgcaggcggtagccaggtgcaggcggtggagtgccgcaaccagctggacagctccgcggtcgccccccactactgcagtgcccacagcaagctgcccaaaaggcagcgcgcctgcaacacggagccttgccctccagactgggttgtagggaactggtcgctctgcagccgcagctgcgatgcaggcgtgcgcagtcgctcggtcgtgtgccagcgccgcgtctctgccgcggaggagaaggcgctggacgacagcgcatgcccgcagccgcgcccacctgtactggaggcctgccacggccccacttgccctccggagtgggcggccctcgactggtctgagtgcacccccagctgcgggccgggcctccgccaccgcgtggtcctttgcaagagcgcagaccaccgcgccacgctgcccccggcgcactgctcacccgccgccaagccaccggccaccatgcgctgcaacttgcgccgctgccccccggcccgctgggtggctggcgagtggggtgagtgctctgcacagtgcggcgtcgggcagcggcagcgctcggtgcgctgcaccagccacacgggccaggcgtcgcacgagtgcacggaggccctgcggccgcccaccacgcagcagtgtgaggccaagtgcgacagcccaacccccggggacggccctgaagagtgcaaggatgtgaacaaggtcgcctactgccccctggtgctcaaatttcagttctgcagccgagcctacttccgccagatgtgctgcaaaacctgccagggccactag

SEQ ID NO: 412 - DNA, 1638 bp, Homo sapiens
  CDS (325)..(1353)
aagaccagcacaagccatgtttccatatccaagacaacccactcccaaccagtcaccagagactgtcatctccggtgcacctggaccaagtggtttgacgtagacttcccatcccctggaccccacggcggggacaaggaaacctacaacaacatcatcaggagtggggaaaaaatctgccgccgacctgaggagatcaccaggctccagtgccgagccgagagccacccggaggtgagcattgaacacctgggccaggtggtgcagtgcagccgtgaagagggcctggtgtgccggaaccaggaccagcagggacccttcaagatgtgcctcaactacgaggtgcgtgtgctctgctgcgagacccctaaaggttgccccgtgacctccacacctgtgacagctcctagcacccctagtgggagagccaccagcccaactcagagcacttcctcttggcagaaatccaggacaaccactttggtgacaaccagcacaacctccactccacagaccagcacaacctctgctcctacaaccagcacaacctctgctcccacaaccagcacaacttctgcccctacaaccagcacaacctccactccacagaccagcatatcctctgcccctacaagcagcacaacctcggctcctacaagcagcacaatctctgctcgtacaaccagcataatctctgcccctacaaccagcacaacctctttccctacaaccagcacaacctctgctactacaaccagcacaacctctgcccctacaagcagcacaacctccactccacagaccagcaaaacctcagctgctacaagcagcacaacctccggttctggaactactcccagccctgttaccaccaccagcacagcctctgtttcaaagaccagcacaacttctgcttctacaaccagcacaacctctggtcctggaactactcccagccctgttcccaccaccagcacaacctctgctcccacaacaagcacaacctctgcccctacaaccagcacaacctcggccccaacaaccagcacaccctctgcccctacaaccagcacaaccttagctcctacaaccagcacaacctctgcccctacaaccagcacaacctctacccctacaagcagcacaacctccactccacagaccagcacaacctcggcttctaccaccagcataacttgtggtcctggaactaccccaagccctgttcccaccaccagcacaacctctgctcctacaaccagcacaacctctgccgctacaaccagcacaatctctgcccctacaaccagcacaactttgtctcgctacagaccagcacatcctgtactactataaccagcacaacttactgcccctatgagcagcagcatgcttcacctgaactttgaacaacaaaaggacactctgccccaggacttgcctggggtggacatacaggccacttcccacctgtttgacaccctcaggatgtagataagtcaggactagatgtttgatccccgagtgctgaccaggacagagatgtcaagcttttgtggatggccttaaggccctgtttgatttagaccttcctttctgctcacagactggacccctggcaggggtgcaccatagcgg

SEQ ID NO: 413 - DNA, 752 bp, Homo sapiens
  CDS (285)..(623)
cgggttcaccccccccccaccacgcgcccccccccccgaagccatgtcactgaaaaggcctgggggggatggtatatggccctttccccaccaggcgctaaggggaacacccccttccccaggtcttttatttgtttaagttatttttgcacaaatgactcttttatatttaattcgatttcattgcctcccttcttaaagccaacaggctcagtttacaaacctgtgagctactgttggctgctgccctccttcccagtgaaaggtacaaagcaataagcatcatgcatcctccccttacccctccaacacccctctgcctctggctcaggttgctcaaagcacagatcctctcttaccccgtccccaggtttgaaacacatagcctcatttcaaggtgtagccaggttcccccgactttcctctgggatataaaaaagggggtaagggggcaaagagagccctctgggcctctcctcccatacacactacactgccccttctccccccatcaaaacgctcagagacgttgtgatgatgcgactgaggattatgcaacgtggtccaaccggagcggccagcatgaccagctgtccaggggctgcctcctgccttttcttttgtaaagacaagacccttgggagttttaattctgttttgtacttgccctgtggggcctccactgcttttctatgggagacactcttaatttaacagatgagaatattttgaaactctgaaaaaaaaaaaaa

SEQ ID NO: 414 - DNA, 1100 bp, Homo sapiens
  CDS (408)..(1004)
ggctaccccgaggctccaacagcctccccgctaaccgcccctcctttacccctaagcccttgcaaaccggtactaactggccccgaggatctctaacgccctccgattagactatggagcatctcttcctcctgaagatacccctcccgtaccacctagatcccttatgaagaatctaagtgtgctccagtaaaatcaatggttgcaatcctgatttaaagcgttttcctcagttccggaaagctcaaaagacatgcggtttacactgagcccaggaacaggttctctttgttcccagacactggtggcattacgtagaatccattgatcctgtcactgtcagtataaactcatggattgaactggaagaggatcacctagcccgggtagaagaggcaatcacccgtatgcttgtgtgtgccctgaaaactgcagagaatccacaaaataccagagcctggttaaaccccactgaggttgaggaaacgtcccatgcagtcaactgttgctacttaaatgcagctgtttctgcattttttgatcgctgcagaacatctgaggtagtagaaatccaagcactgagaacagatggagagcacatgaaaaaggaagaattaaatgtgtgcaaccacatggaggtgggccaaacaggtagccagaacttgaccacaggaacagacaaaccggaggcagcaagtccctttggccctgatctggtccctgtagcacagaggtccgaagaaccgccttcagaaagaggaggcatatttggaagtgatgggaaagactttgtggacaaggatggagaacactttggaaaattgcattgtgccaagagacaacaaataatgagcaacagtgaaaatgcaattgaggaacagattgcctcaaatactactacgactcctcaaacattcatttctacggatgacttgctggactgcttggtgaatccacaagtaaccaggatagtggcacaacttttgatacaaggaagaagtttatgattcaagtggaagatgacttttaaaataatattttttaaatatatatttttaagtagtatgactaaaataaagatgaaccagcaaaaaaaaaaa

SEQ ID NO: 415 - DNA, 1127 bp, Homo sapiens
  CDS (159)..(1112)
tgggaaacgagagccccagctgctccaggttggggccgtgggggctccctaaggaggggacaccagggccccaatgtttcacagaggggcggggggcagcgaccctgggcagcatggcctcaggctgaagcccgatctggcatttccttgtgctcataatgagaatagttctccaattagccaagatgaacctcatggacatcaccaagatcttctccctcctgcagcccgacaaggaggaggaggacactgacacagaggagaagcaggctctcaatcaagcagtgtatgacaacgactcctatactttggaccagcttttgcgccaggagcgttacaaacgtttcatcaacagcaggagtggctggggtgttcctgggacacccttgcgcttggctgcttcttatggccacttgagctgtttgcaagtcctcttagcccatggtgctgatgttgacagcttggatgtcaaggcacagacgccacttttcactgctgtcagtcatggccatctggactgtgtacgtgtgcttttggaagctggtgcctctcctggtggtagcatctacaacaactgttctcccgtgctcacagctgcccgtgatggtgctgttgctatcctgcaggagctcctagaccatggtgcagaggccaacgtcaaagctaaactaccagtctgggcatcaaacatagcttcatgttctggccccctctatttggccgcagtctacgggcacctggactgtttccgcctgcttttgctccacggggcagaccctgactacaactgcactgaccagggcctattggctcgtgtcccaagaccccgcaccctccttgaaatctgcctccatcataattgtgagccagagtatatccagctgttaatcgattttggtgctaatatctaccttccatctctctcccttgacctgacctcacaagatgataaaggcattgcattgctgctacaggcccgagccactccacggtcacttctatcacaggtccgtttagtcgtccgcagagccttgtgccaggctggccagccacaagccatcaaccagctggatattcctcccatgttgattaactacctaaaacaccacctgtaatcttgcagtctg

SEQ ID NO: 416 - DNA, 1156 bp, Homo sapiens
  CDS (524)..(931)
gcagctgtggctgcctgggttattggaagtcatggagcccctgtcatgggaagaaatgctcacgttatcttcagggagtttcaggaggtttttggctcaaggcacccaactgtcaggcacaaagaaagcattgtgtccctaccctcactgctctcctgtgcccaggttattaacacaaattccattattgtcaaggctttggctagaatggcttgttcctgctggggctgaccattagaactgagatggaggaacaaaagctcccccgatcccgatcctaaccttccacccagtcccctcccactccccaggtcccataaagtggcgggagcatcgtagcgtaggaagaagccgccacaccttcctccataacctgggaggatggaagagctcttcgaagctttgctcttcgtgtccccctgaaacaagggttactgtgagtcttgcacacaaggaacatgcgctccaaggttcctagccaggtgggtgctctgcaaagttagggcaaagagagtctggccacatgcagcctctccactggagaaggattttcatctgccaggtggcggggcccttagcctcgttaatcctgcttaatcctgctagaacatacctacagggagcccactttccacgcagagcatcccttgaaggaggggcttcccagaatgctgaggattctgggcttctcagactccgatcagatgcacctcagccctgggatcagtgccccagccctgcctgccagtttcctttttcacttcaccatgagcataagtttgggtgggaactcagcctgttcattcacttcatactgagttcccactctgtgccagggcctgacctgtgcactgccaaaagagcagggaacagcaaaaccctttcctcccaccgtgggccttggagaatgaatgcagggggtggccacgggtagtcgtctggggcttggttctccctgagctaacctcgccagcctggcccagcttgccctgatcccctgatggtccgtgcacatgtgtttatacttgcattgttgactggggtccaattgcctttttggcaaaggcatcaagcattcaaagatgttcagatcttttctgtctggctcttttcctcggaatgaggctccagtgtgtccctttagtcccttagccat

SEQ ID NO: 417 - DNA, 2129 bp, Homo sapiens
  CDS (1820)..(2044)
ggggactggctctcagtaatcccacgtaaggtacctgccgtcggaagatttgaactttctacttggacaactaacacccacagtcctccaggtgggtcctaaggatcttaggagcaacgatggggggtcctaagccagggggggatgagggtctggctctcagtccctgcctcgcggggggtgcctcccccctctgcgatgggggtcctaagagccagtgggggaaccaggggctggctctcagtccctgcctcgcgggggtgcctccccctccctgcgatgggggtaccaacagccaggggcggaagaggggatagctctcagtccccaccctcgtggggttgcctccccctcctgcgatgggggtcctaagaacccgggggggaaagagggactggctctcagtccctgcctcgcggggggtgcctccccccctgcgatgggggtactcacagccaggggcggaagaggggatagctctcagtccccactctcgtggggggtgcctccccctcctgcgatgggggtccccagagacagggtggggaagagggactggctctcagtaatcccacgtaaggtacctgccgtcggaagatttgaactttctacttggacaactaacacccacagtcctccaggtgggtcctaaggattcttaggatcaacgatcgggggtcctaagccgggggggaagagggtctggctctcagtccccacctcgcggggggtgcctccccctcctgcgatgggggtccccagagccagggggggaagagggactggctctcagtccctgcctcgcgggggttcctccgcccccagcgatgggggtcctaagagccaaaggggggaagaggggctcgctctagtccccgcgtcggtgaggggtgcctcctcccctgtgatgagggtgcaaagagccaggggaggaaagggggaggttcgcagtccccgcctcgcgggatttgcctcccccactgcgatagtggtcccaagagccaggcggggaagaggggttgctctgagtccccgcctcgcggggggttgcctccccccactgcgatgggagtcccaagagccaggggggaagaggggatggatctcagccatcacaaaatggggggcctttatattcaggttttacccaagaatcagcttatttgcttcttgtactagcagggcagttgctgccaaggccctctaataggggggccatcctttagaaacctgtctagttgtttagagacgtaggctaccggcctcagccagggccccacagtttgggttaaaagtccagctgccatcttttctctctctgacgcatacaatggaaaaggctttgtcagatcgggtagccccagggctggggctgccagaagtttttcctttaactaatgaaagacttgctgttgtcgggatccccatttcaaagtttccgggtccccgccccctttgtgacctcatacaaaggcttggctaatactgcaaagtttgggatccacagtctacaaaaccccacagctcctaagaattctctcacctgccttctgcccttaagctccggtagattgcaaataacctgctttctttctgttcccgagctgcgttcggacccatgtcttattgtaaatcccacgcaaggtacctgccgtcggaagatttgagctttcttcttgaacacctcatacccacagtcctccaggcgccagtgggatcaagagagggcaacattgcaactctccatgctcctgcaatatccatggctattctgtagacagaaagacaacaggtacaaagccctaaggattataaaggtatgctgcttaccatcatcttagtgaccaaggcagcgaagctgtttctgtaccttggaacagtcttccctgacaagccagagaacagtgataaagccaccagccttgggatcaggactgaaaaggcaagagtgatggagatttctcctgcgctaagccaagagaaggtttcagcacttcagacagctcccaccgaagtagccgcgctcccagctgcttgcagatgttgaaaaggaaagcctcggtttgtcttgaggttgtcagcaggtgcaagacacgtaataaaatgcaatgtgttcctaaaaaaaaaaa

SEQ ID NO: 418 - DNA, 1783 bp, Homo sapiens
  CDS (118)..(1392)
agctgagtcgagctcgccggagcgggcacctctgtcagcctcctcgcagttgtagttattgtgtgtggcgtggccctggtggcagattttctctttctcttttggaagctgtgctggatgccctggaggaacaaggaggcctccagtccctcttctgctaatccccccttggaagccctccagagccccagcttcagaggcaacatggcggacaagctgaaggaccccagcaccctgggcttcctggaggcggccgtgaagatcatccacacgtccccagatatcccagctgatgtgcagatgtcggtcaaggagcacatcatgcgtcacacccggctgcagcggcaaactacagagccagcgtcatccaccaggcacacgtccttcaagcgccacctgccaaggcagatgcatgtctccagtgtagactatggcaatgagcttccaccagcagcagagcagcccaccagcattggccgcatcaagcctgagctctacaagcagaagtcggtggatggggaggatgccaagtctgaggccaccaagagctgcgggaagatcaacttcagcctacgctacgattacgagaccgagaccctgattgtgcgtatcctgaaggcttttgacctccctgccaaggacttttgtggaagctctgacccttatgtcaagatctacctcctgcctgaccgcaaatgcaagctgcagacccgggtgcaccgcaagaccctgaaccccacctttgatgagaacttccacttccctgtgccctatgaggagctggctgaccgcaagctgcatctcagtgtcttcgactttgaccgcttctcccgccatgacatgattggcgaggtcatcctggacaacctctttgaggcctctgacctgtctcgggaaacctccatctggaaggatatccaatatgccacaagtgaaagcgtggacttgggagagatcatgttctccctttgctacctgcccactgcaggcaggctcaccctcacagtgattaagtgtcggaacctcaaggcgatggacatcacaggctattcagatccctatgtgaaagtgtccttgctctgtgatgggcggaggctgaagaagaagaaaacaaccataaagaaaaacactctcaatcctgtctacaatgaggccatcatctttgacattcccccggaaaacatggatcaagtcagcctgctcatctcagtcatggactatgatcgagtgggccacaatgagatcataggagtctgtcgtgtggggatcactgctgaaggcctgggcagggaccactggaacgagatgctggcatacccccggaagcccatcgcacactggcactccttggtggaggtaaagaaatccttcaaagagggaaaccctcggttgtgatttcattcacgtggatgctgcaagcagagagactgccacctggagttaggatggcagggccgagctgctagcttcgacagtgagagctcgtgcccatctccgaaaccacctccaacaccatgagatgtgcagccaaataacacaaatgggactcagcaatgttctctttgcacttgttcaaccgtctaaacagtgttgtgcagtcgcagtggcggcagcagcggcagccgtccgtcactccagagtcttacctgctcctgtgtaggtcaaggctgagacacttgtcatgtggtcagatctgtcttagtcttttgtgtctcccaaggtgatgtttttgtggtttttcactttttatgggtctgctggtaagaaaagggaaaaaaaaaaa

SEQ ID NO: 419 - DNA, 1762 bp, Homo sapiens
  CDS (118)..(1371)
agctgagtcgagctcgccggagcgggcacctctgtcagcctcctcgcagttgtagttattgtgtgtggcgtggccctggtggcagattttctctttctcttttggaagctgtgctggatgccctggaggaacaaggaggcctccagtccctcttctgctaatccccccttggaagccctccagagccccagcttcagaggcaacatggcggacaagctgaaggaccccagcaccctgggcttcctggaggcggccgtgaagatcatccacacgtccccagatatcccagctgatgtgcagatgtcggtcaaggagcacatcatgcgtcacacccggctgcagcggcaaactacagagccagcgtcatccaccaggcacacgtccttcaagcgccacctgccaaggcagatgcatgtctccagtgtagactatggcaatgagcttccaccagcagcagagcagcccaccagcattggccgcatcaagcctgagctctacaagcagaagtcggtggatggggaggatgccaagtctgaggccaccaagagctgcgggaagatcaacttcagcctacgctacgattacgagaccgagaccctgattgtgcgtatcctgaaggcttttgacctccctgccaaggacttttgtggaagctctgacccttatgtcaagatctacctcctgcctgaccgcaaatgcaagctgcagacccgggtgcaccgcaagaccctgaaccccacctttgatgagaacttccacttccctgtgccctatgaggagctggctgaccgcaagctgcatctcagtgtcttcgactttgaccgcttctcccgccatgacatgattggcgaggtcatcctggacaacctctttgaggcctctgacctgtctcgggaaacctccatctggaaggatatccaatatgccacaagtgaaagcgtggacttgggagagatcatgttctccctttgctacctgcccactgcaggcaggctcaccctcacagtgattaagtgtcggaacctcaaggcgatggacatcacaggctattcagatccctatgtgaaagtgtccttgctctgtgatgggcggaggctgaagaagaagaaaacaaccataaagaaaaacactctcaatcctgtctacaatgaggccatcatctttgacattcccccggaaaacatggatcaagtcagcctgctcatctcagtcatggactatgatcgagtgggccacaatgagatcataggagtctgtcgtgtggggatcactgctgaaggcctgggcagggaccactggaacgagatgctggcatacccccggaagcccatcgcacactggcactccttggtggagggaaaccctcggttgtgatttcattcacgtggatgctgcaagcagagagactgccacctggagttaggatggcagggccgagctgctagcttcgacagtgagagctcgtgcccatctccgaaaccacctccaacaccatgagatgtgcagccaaataacacaaatgggactcagcaatgttctctttgcacttgttcaaccgtctaaacagtgttgtgcagtcgcagtggcggcagcagcggcagccgtccgtcactccagagtcttacctgctcctgtgtaggtcaaggctgagacacttgtcatgtggtcagatctgtcttagtcttttgtgtctcccaaggtgatgtttttgtggtttttcactttttatgggtctgctggtaagaaaagggaaaaaaaaaaa

SEQ ID NO: 420 - DNA, 1718 bp, Homo sapiens
  CDS (161)..(1675)
tttcgtctcccactgcctttccttcttcccgcgagtcagaagcttcgcgagggcccagagaggcggtggggtgggcgaccctacgccagctccgggcgggagaaagcccaccctctcccgcgccccaggaaaccgccggcgttcggcgctgcgcagagccatggaattctcctggctggagacgcgctgggcgcggcccttttacctggcgttcgtgttctgcctggccctggggctgctgcaggccattaagctgtacctgcggaggcagcggctgctgcgggacctgcgccccttcccagcgccccccacccactggttccttgggcaccagaagtttattcaggatgataacatggagaagcttgaggaaattattgaaaaataccctcgtgccttccctttctggattgggccctttcaggcatttttctgtatctatgacccagactatgcaaagacacttctgagcagaacagatcccaagtcccagtacctgcagaaattctcacctccacttcttggaaaaggactagcggctctagacggacccaagtggttccagcatcgtcgcctactaactcctggattccattttaacatcctgaaagcatacattgaggtgatggctcattctgtgaaaatgatgctggataagtgggagaagatttgcagcactcaggacacaagcgtggaggtctatgagcacatcaactcgatgtctctggatataatcatgaaatgcgctttcagcaaggagaccaactgccagacaaacagcacccatgatccttatgcaaaagccatatttgaactcagcaaaatcatatttcaccgcttgtacagtttgttgtatcacagtgacataattttcaaactcagccctcagggctaccgcttccagaagttaagccgagtgttgaatcagtacacagatacaataatccaggaaagaaagaaatccctccaggctggggtaaagcaggataacactccgaagaggaagtaccaggattttctggatattgtcccttctgccaaggatgaaagtggtagcagcttctcagatattgatgtacactctgaagtgagcacattcctgttggcaggacatgacaccttggcagcaagcatctcctggatcctttactgcctggctctgaaccctgagcatcaagagagatgccgggaggaggtcaggggcatcctgggggatgggtcttctatcacttgggaccagctgggtgagatgtcgtacaccacaatgtgcatcaaggagacgtgccgattgattcctgcagtcccgtccatttccagagatctcagcaagccacttaccttcccagatggatgcacattgcctgcagggatcaccgtggttcttagtatttggggtcttcaccacaaccctgctgtctggaaaaacccaaaggtctttgaccccttgaggttctctcaggagaattctgatcagagacacccctatgcctacttaccattctcagctggatcaaggaactgcattgggcaggagtttgccatgattgagttaaaggtaaccattgccttgattctgctccacttcagagtgactccagacccaccaggctcttactttccccaacattttatcctcaagaccagaatgcgactgtatttgcacctgagaaatctctgaatgttagatctcaggctcccatgataaccgtactggtttc

SEQ ID NO: 421 - DNA, 1221 bp, Homo sapiens
  CDS (319)..(543)
aaaattctccccgaaatgaggctcctctaacaaatgatgattaaaacgctctctccttgagcagtcacattctagaaacaggacattccatgaggcaggaagagttcagttaatttgctcctgaaaaagtgtggttcagtgtttgtgtggcaatgtacgtgggcagaagaggccgctcaagctgtgtcccccctgagcaggattcaggaaagggaaaagaagttctcttcaactcagccaaggggccgtacgatggccgatgagattatgtatttaaaagttctttgtaaagtgtaaactaaaaaccttaaatgtaagatgctgttgttattattactgttgttgttgctgttatggacatgccaaaaggcccttgttagaagacagttttgccttttcaatctcatagcaaggaactcaagtctgatgcttcaaaaagatgagaagaagggcaagaagagggataactcccaagctcagagggaaaaaaaaggtgggggaaaagagccccagggtgaccttcaggaaaggccaggaccaggatgatctaacctttcccttcaccagaaacaaagctattgccagactgaaccctaaagtcaagcagtcacccactgcctttgctgggagcagaagcccatagcaacaagtgacctgcccctcagactcaagatcccagataccagagctggaggagtcatagggcattactggtaggcaggaaaactgagggtcgaacaaatggaagaatgcggtgatcatagaccaaagacacacagataattaaccccatgtgtccacccaggccaaagttcttcctgctaccccacagtggatgtccaggcagatggtccccacatgatggggaagcagagggcatagtgtggttttgtgggacttgttcatgttttgtagtgtgggctcaacagtgccaaaggaaacactagggaaaagttggtgaaacatgccagctagcaggaccagtaaaggcataatcaggcatttggcaaagcttgcttttctaattcaatgataggttctaataggaaatttttgaagattttttaaaacaatgttatagtggcacttccccagtatggaataaataacatgcattcttttttcaatatactgtcatattcagatgtcattaaaataaatggatgagtcacagaggagctatcagatgctctcatgactaccataactcaaaaaaaaaaa

SEQ ID NO: 422 - DNA, 2820 bp, Homo sapiens
  CDS (265)..(2577)
gtctcgaattcccgggtcgacgatttcgttagagagacagctccgcgcagtaagtgcggactgccagccaccagccttggcagccagctcgtcgcctccagccccgaccccgacattcatgcccaggagaaggctgcactgggtccctctgggcctttcctaaaagggagatccctgttcactagatgagttccagaaccatccactaaggctttgtagcccccttccatcagctgaccttcactgcatcccctatcgctcaagatgagtggcttcttcacctcgctggacccccggcgggtgcagtggggagctgcctggtatgcaatgcactccaggatcctacgcaccaaaccagtggagtccatgctagagggaactgggaccaccacggcacatggaactaagctagcccaggtactcaccacagtggacctcatctctcttggcgttggcagctgtgtgggcactggcatgtatgtggtctctggcctggtggccaaggaaatggcaggacctggtgtcattgtgtccttcatcattgcagccgtcgcatccatattatcaggcgtctgctatgcagagtttggagttcgagtccccaagaccacaggatctgcctacacctacagctatgtcactgttggggaatttgtggcatttttcattggctggaacctgatcctggagtacctgattggcactgcggccggagccagtgctctgagcagcatgtttgactcactagccaaccacaccatcagccgctggatggcggacagcgtgggaaccctcaatggcctggggaaaggtgaagaatcatacccagaccttctggctctgttgatcgcggtcatcgtgaccatcattgttgctctgggggtgaagaattccataggcttcaacaatgttctcaatgtgctgaacctggcagtatgggtgttcatcatgatcgcaggcctcttcttcatcaatgggaaatactgggcggagggccagttcttgccccacggctggtcgggggtgctgcaaggagcagcaacatgcttctacgctttcattggctttgacatcatcgccaccactggagaggaagccaagaatcccaacacgtccatcccttatgctatcactgcctccctggtcatctgcctgacagcatatgtgtctgtgagcgtgatcttaactctgatggtgccatattataccattgacacggaatccccactcatggagatgtttgtggctcatgggttctatgctgccaaattcgtagtggccattgggtcggttgcaggactgacagtcagcttgctggggtccctcttcccgatgccgagggtcatttatgccatggctggtgacgggctccttttcaggttcctggctcacgtcagctcctacacagagacaccagtggtggcctgcatcgtgtcggggttcctggcagcgctcctcgcactgttggtcagcttgagagacctgatagagatgatgtctatcggcacgctcctggcctacaccttggtctctgtctgtgtcttgctccttcgataccaacctgagagtgacattgatggttttgtcaagttcttgtctgaggagcacaccaagaagaaggagggcattctggctgactgtgagaaggaagcttgttctcctgtgagtgagggggatgagttttctggcccagccaccaacacatgtggggccaagaacttaccatccttgggagacaatgagatgctcatagggaaatcagacaagtcaacctacaacgtcaaccaccccaattacggcaccgtggacatgaccacaggcatagaagctgatgaatccgaaaatatttatctcatcaagttaaagaagctgattgggcctcattattacaccatgagaatccggctgggccttccaggcaaaatggaccggcccacagcagcgacggggcacacggtgaccatctgcgtgctcctgctcttcatcctcatgttcatcttctgctccttcatcatctttggttctgactacatctcagagcagagctggtgggccatccttctggttgttctgatggtgctgctgatcagcaccctggtgtttgtgatcctgcagcagccagagaaccccaagaagctgccctacatggccccttgcctcccctttgtgcctgcctttgccatgctggtgaacatctatctcatgctaaagctctccaccatcacatggatccggtttgcggtctggtgctttgtgggtctgctcatttattttggatatggcatctggaacagcaccctggaaatcagcgctcgagaagaggccctgcaccaaagcacgtaccaacgctacgacgtggatgaccccttctcagtggaggagggtttctcctacgccacagagggcgagagccaggaggactggggcgggcccactgaagacaaaggcttctattaccaacagatgtcagatgcgaaggcaaacggccggacaagtagcaaagcgaagagcaaaagcaaacacaaacagaactcagaggccctgattgcaaatgatgagttagattactctccagagtaggagaaacacacaagtgggtagaaatggtgatgactgattttcagtaacttaacctgtgggctagaaggtgaaaacttttttggctctcatttcacaaatccagccttccccaaattcaatccctagtcatagcctgtcatttgctacttttgctcttcaggatagttctgttgaagggcttaacctgggtcccctaactggtcgccttgttaaataaaataaataaataaaaaaaaaaaa

SEQ ID NO: 423 - DNA, 1372 bp, Homo sapiens
  CDS (59)..(961)
gggcagtcggcggctgcctccggcggaggtgcctcgcggcgcctcggcggcgtgctccatgcatccggagcccgccccgcccccgagccgcagcagtcccgagcttcccccaagcggcggcagcaccaccagcggcagccgccggagccgccgccgcagcggggacggggagcccccgggggccccgccaccgccgccgtccgccgtcacctacccggactggatcggccagagttactccgaggtgatgagcctcaacgagcactccatgcaggcgctgtcctggcgcaagctctacttgagccgcgccaagcttaaagcctccagccggacctcggctctgctctccggcttcgccatggtggcaatggtggaggtgcagctggacgctgaccacgactacccaccggggctgctcatcgccttcagtgcctgcaccacagtgctggtggctgtgcacctgtttgcgctcatgatcagcacctgcatcctgcccaacatcgaggcggtgagcaacgtgcacaatctcaactcggtcaaggagtccccccatgagcgcatgcaccgccacatcgagctggcctgggccttctccaccgtcatcggcacgctgctcttcctagctgaggtggtgctgctctgctgggtcaagttcttgcccctcaagaagcagccaggccagccaaggcccaccagcaagccccccgccagtggcgcagcagccaacgtcagcaccagcggcatcaccccgggccaggcagctgccatcgcctcgaccaccatcatggtgcccttcggcctgatctttatcgtcttcgccgtccacttctaccgctcactggttagccataagactgaccgacagttccaggagctcaacgagctggcggagtttgcccgcttacaggaccagctggaccacagaggggaccaccccctgacgcccggcagccactatgcctaggcccatgtggtctgggcccttccagtgctttggccttacgcccttccccttgaccttgtcctgccccagcctcacggacagcctgcgcagggggctgggcttcagcaaggggcagagcatggagggaagaggatttttataagagaaatttctgcactttgaaactgtcctctaagagaataagcatttcctgttcttccagctccaggtccacctcctgttgggaggcggtggggggccaaagtggggccacacactcgctgtgtcccctctcctcccctgtgccagtgccacctgggtgcctcctcctgtcctgtccgtctcaacctccctcccgtccagcattgagtgtgtacatgtgtgtgtgacacataaatatactcataaggacacctccaaaaaaaaaaa

SEQ ID NO: 424 - DNA, 2686 bp, Homo sapiens
  CDS (47)..(2416)
tttcgttttgggatcaccagtcggagcccttcgtgttacagctagaatgggtactaggaaaaaagttcatgcatttgtccgtgtcaaacccaccgatgactttgctcatgaaatgatcagatacggagatgacaaaagaagcattgatattcacttaaaaaaagacattcggagaggagttgtcaataaccaacagacagactggtcgtttaagttggatggagttcttcacgatgcctcccaggacttggtttatgagacagttgcaaaggatgtggtttctcaggccctcgatggctataatggcaccatcatgtgttatgggcagacgggagctggcaagacatacaccatgatgggggcaactgagaattacaagcaccgggggatcctccctcgtgccctgcagcaggtttttaggatgatcgaagaacgccccacacatgccatcactgtgcgtgtttcctacttggaaatctataatgagagcctgtttgatctcctgtccactctgccctatgttggaccctcagtcacaccaatgaccatcgtggaaaaccctcaaggagtcttcattaagggcttgtcagttcacctcacaagtcaggaggaggatgcattcagcctcctttttgagggtgagaccaacaggattatagcctcccacactatgaacaaaaactcttccagatcacactgcattttcaccatctacttagaggcccattcccggaccttatcagaggaaaagtacatcacttccaaaattaacttggtggatctggcaggctcagagaggctggggaagtctgggtctgagggccaagtcctgaaggaagccacctacatcaacaaatcgctctcattcctggagcaggccatcattgcccttggggaccagaagcgggaccacatcccctttcggcagtgcaagctcacccacgctctgaaggactcgttagggggaaactgcaatatggtcctcgtgacaaacatctatggagaagctgcccagttagaagaaacgctatcttcactgagatttgccagcaggatgaagctagtcaccactgagcctgccatcaatgaaaagtatgatgctgagagaatggtcaagaacctggagaaggaactagcactactcaagcaggagctggctatccatgacagcctgaccaaccgcacctttgtgacctatgaccccatggatgaaatccagattgctgagatcaactcccaggtgcggaggtacctggaggggacactggacgagatcgacataatcagccttagacagatcaaggaggtgttcaaccagttccgggtggttctgagccaacaggaacaggaagtggagtccactttgcgcaggaagtacaccctcattgacaggaatgactttgcagccatttctgctatccagaaggcggggcttgtggatgttgatggccacctagtgggtgagcctgaaggacaaaactttggactcggagtcgcccctttctctaccaaacctgggaagaaagccaagtccaagaagacattcaaagagccactcagctccttggcaagaaaggaaggtgccagcagccctgtgaatgggaaggacttggattacgtttccacctccaagacccagctggtcccatcctccaaagatggggatgtcaaagacatgctttcgcgggaccgggaaacttccagcattgagccccttccctcagactccccgaaggaggaattacgcccaattaggcccgacaccccaccctccaaaccagtggcctttgaggagtttaagaatgagcaaggtagtgagatcaaccgaattttcaaagaaaacaaatccatcttgaatgaacggaggaaaagggccagcgagaccacacagcacatcaatgccatcaagcgggagattgatgtgaccaaggaggccctgaatttccagaagtcactatgggagaagcaaggcaagtacgaaaacaaggggctgatgatcatcgatgaggaagaattcctgctgatcctcaagctcaaagacctcaagaagcagtaccgcagcgagtaccaggacctgcgtgacctcagggctgagatccagtattgccagcacctagtggatcagtgtcgccaccgcctgctcatggaatttgacatctggtacaatgagtcctttgtcatccctgaggacatgcagatggcactgaagccaggcggcagcatccggccaggcatggtccctgtgaacaggattgtgtctctgggagaagatgaccaggacaaattcagccagctgcagcagagggtgcttcctgagggccctgattccatctccttctacaatgccaaagtcaagatagagcagaagcataattacttgaaaaccatgatgggcctccagcaggcacatagaaaatagaacctcatcgccagtaccttaaaggacaagaccagcaactcccacctactgtagtggagctgctcaaccacctgcccagagctgcagccccctctactccaatgctgggacccagcacagagaacacatttggcctgcatgttgggaggagcatcctccaaggacaaccttgctcatctccacagagcactttgggttttaattcactgtcttatatgcagggacaggataaaataactttctagtttggactttcaaaaaaaaaaa

SEQ ID NO: 425 - DNA, 3245 bp, Homo sapiens
  CDS (1187)..(3070)
atggggcccagaagggtagggttaggggcggggacggtgctggggatgctgagggtcgccctggaaacctctgggaagattttccagaggggtagtagtaatgaagaaattggaggtggggcccgctatgaggaccgaatgacagagcagcacctgttggctgcatatgataatcaggctactgttacacctaagactcacacagcagagaaaggagccttgggaaggagcccctctggcctgaaagatcaagcctattgctgggcatggccagtcagcctccgccgcagcccaggaagccagccgggacgccgccgccccggaccccgcgccctaacctccacctcgggggcctgcacccccagattgaatcgggaattccggaaacccgagcctggaaccctgatctgggaccagcaccccgagatccggccgtggaaccccaagatctggagcctgaaccccagtatatggggctggaatctcaacatcggtcactgggacctcaatatttggagccggaaccccacaatttggaacacagaccccaatatttggagcagaaccccaagatttgacatctaaaacctcaagcctggagctgaactctgaattctgggcctgggaccttgaaatctgggactggatttccagtactgtaccctggaacccactcttggggacctgaaccctgggattcaggcctcaaattccaagatctggactgtgggattccaaggggcctgaacccgagtttgggcctgaagtccttgctgcagacctgagtgcttaaatctggggcttgagacctcccaatcttgactcagcaccccaatatctgaatgcagaaccccgggatcggatctcagactctaaaccccaccgtttggctgcttagcatcccaagactggacctgggagaccctgaccctgaacaacccaaactggacccgtaaaactggaccctagaggcccaatatttaggggtctggaaccccgagtattaaggtctggagactccgttgccacagatttgagccgagtcaggacacagtccctctacagaagccttggggacaggaaaagcatgaccagatgctccctccagagccctgacctctgactcccctggagctaggactctgctccctggggctgcttctagctcaggacacccctgcccgcgatggccatcctcccgttgctcctgtgcctgctgccgctggcccctgcctcatccccaccccagtcagccacacccagcccatgtccccgccgctgccgctgccagacacagtcgctgcccctaagcgtgctgtgcccaggggcaggcctcctgttcgtgccaccctcgctggaccgccgggcagccgagctgcggctggcagacaacttcatcgcctccgtgcgccgccgcgacctggccaacatgacaggcctgctgcatctgagcctgtcgcggaacaccatccgccacgtggctgccggcgccttcgccgacctgcgggccctgcgtgccctgcacctggatggcaaccggctgacctcactgggcgagggccagctgcgcggcctggtcaacttgcgccacctcatcctcagcaacaaccagctggcagcgctggcggccggcgccctggatgattgtgccgagacactggaggacctcgacctctcctacaacaacctcgagcagctgccctgggaggccctgggccgcctgggcaacgtcaacacgttgggcctcgaccacaacctgctggcttctgtgcccgccggcgctttttcccgcctgcacaagctggcccggctggacatgacctccaaccgcctgaccacaatcccacccgacccactcttctcccgcctgcccctgctcgccaggccccggggctcgcccgcctctgccctggtgctggcctttggcgggaaccccctgcactgcaactgcgagctggtgtggctgcgtcgcctggcgcgggaggacgacctcgaggcctgcgcgtccccacctgctctgggcggccgctacttctgggcggtgggcgaggaggagtttgtctgcgagccgcccgtggtgactcaccgctcaccacctctggctgtgcccgcaggtcggccggctgccctgcgctgccgggcagtgggggacccagagccccgtgtgcgttgggtgtcaccccagggccggctgctaggcaactcaagccgtgcccgcgccttccccaatgggacgctggagctgctggtcaccgagccgggtgatggtggcatcttcacctgcattgcggccaatgcagctggcgaggccacagctgctgtggagctgactgtgggtcccccaccacctcctcagctagccaacagcaccagctgtgaccccccgcgggacggggatcctgatgctctcaccccaccctccgctgcctctgcttctgccaaggtggccgacactgggccccctaccgaccgtggcgtccaggtgactgagcacggggccacagctgctcttgtccagtggccggatcagcggcctatcccgggcatccgcatgtaccagatccagtacaacagctcggctgatgacatcctcgtctacaggatgatcccggcggagagccgctcgttcctgctgacggacctggcgtcaggccggacctacgatctgtgcgtgctcgccgtgtatgaggacagcgccacggggctcacggccacgcggcctgtgggctgcgcccgcttctccaccgaacctgcgctgcggccatgcggggcgccgcacgctcccttcctgggcggcacgatgatcatcgcgctgggcggcgtcatcgtagcctcggtactggtcttcatcttcgtgctgctaatgcgctacaaggtgcacggcggccagccccccggcaaggccaagattcccgcgcctgttagcagcgtttgctcccagaccaacggcgccctgggccccacgcccacgcccgccccgcccgccccggagcccgcggcgctcagggcccacaccgtggtccagctggactgcgagccctgggggcccggccacgaacctgtgggaccctagccaggcgcccccccctctaagggtcctctggccccacggacagcaggacccggacaccctgtgggacctggcctcaaactcaccaaatcgctcatggtttttaaaactctgatggggagggtgtcggggacaccggggcaaaacaagaaagtcctatttttccaaaaaaaaa

SEQ ID NO: 426 - DNA, 1412 bp, Homo sapiens
  CDS (348)..(1409)
cggtatgcatctgagatataaagaagaaaaagccacagctccttccttcgtgatgctcatagtctgttagaggaagaattcagtgtcctggcaggttacaatggtaccatctttgcatatgggcaaacaggcagcgggaagacattcactatcacagggggtgcagagcgttacagtgacagaggcattatcccaaggacactgtcttacatttttgaacagttacaaaaggacagcagcaaaatatatacaacacacatttcctatttggaaatctacaatgaatgtggttatgatcttttggatccaagacatgaagcctccagtttggaagatttgccactcctatgaaccaagcttcaacccgttcccactgcattttcaccattcatttgtcaagcaaggaaccaggatctgcaactgtacgacatgccaaactccatctggttgacctggctggttcagagcgagttgcaaagactggagtagggggccatcttctaacagaggccaagtatatcaacttgtcactacattacttagaacaggttatcattgccctttcagaaaagcaccgttcgcacattccttatagaaactccatgatgaccagtgtcctaagagacagtttgggagggaactgcatgacaactatgattgcaacactctccttggagaaaaggaatcttgatgagtctatatcaacctgcagatttgcacagcgagtggcactcataaagaatgaagctgttcttaatgaagaaattaaccccagattagtgattaaacgcctacaaaaggaaatccaggaactgaaggatgaactggccatggtcactggggagcagaggacagaggcactcacagaagcagagctccttcagctggaaaaactaataacatcctttttggaagaccaggattcagacagtagattagaggttggcgcggatatgcgtaaagttcatcactgttttcatcatttaaagaaactattgaatgacaagaagatccttgaaaacaatacagtctcctctgaaagcaaagaccaagattgtcaagaaccattaaaagaagaagaatatagaaagctacgagatattctgaaacagagagataacgaaatcaatatcctggtcaacatgttaaaaaaaaaaaaaaaaaaagctcaggaggctctccacttggctggcatggatagacgtgaattcagacagtcccagagcccacccttccgcctaggaaacccagaagaaggtcaaagaatgcgactatcctcagctccctcacaggcccaggacttcagcattttggggaaaagatccagtttgctccacaagaaaataggtcagttgactaaatttccagtatttctcattgtctgtaatggatttcgatgtagcaccctttag

SEQ ID NO: 427 - DNA, 2191 bp, Homo sapiens
  CDS (59)..(1357)
ccggaggaaatgggaggtgttcccgggaagaaacaagttcttctgtaacgggaggatcatgatggcccggcagacgggcgtcttctacctgacgctcgtcctcatcctggtcactagcggactcttcttcgccttcgactgtccgtacctggcggtgaaaatcacccctgccatccctgcagtcgctggcatcctgttcttctttgtgatggggaccctgctccgcaccagcttcagcgaccccggagtcctcccacgagccacgcctgatgaagccgccgatctggaaaggcaaatagatatcgcaaacggcaccagttcaggggggtaccgcccgcctcccagaaccaaagaagtcatcatcaatggccagaccgtgaaacttaaatactgtttcacctgcaagattttccggccccctcgcgcctcccattgcagcctttgtgataactgcgtagaacggtttgatcaccactgtccctgggtaggcaactgtgtggggaaaagaaactacagatttttttatatgtttattttatctctgtcttttctgacagtctttatatttgcattcgatatcacccacgtcattcttcgttcacagcaaacaggattcctaaatgcccttaaggacagtcctgcaagcgtcctggaggctgtggtgtgcttcttctctgtctggtccatcgttggcctctcaggattccacacctacttgatcagctccaaccagacaacaaatgaggacattaaaggatcctggtcaaataaaagaggtaaagaaaattacaatccctacagctacggaaatatctttaccaactgctgtgttgccctgtgtgggcccatctcaccaagcctgatcgacagaagagggtacatccagcccgacacgccgcagccagcagcaccctccaatggcatcaccatgtacggggccacgcagtcacagagtgacatgtgcgaccaagaccagtgcattcagagcaccaaattcgttttgcaggctgcagccacgcccctgctgcagagcgagcccagcctcaccagcgacgagctgcacctgcccgggaagcctggcctgggcacgccctgcgccagcctcacactgggcccgcccacaccgcccgcctccatgcccaacctcgccgaggccacgctcgcggacgtgatgccccggaaagatgagcacatgggccaccagttcctgacgcccgatgaggcgccctcgccccccaggctactggcggcgggcagccccctggcgcacagccgcaccatgcacgtgctgggcctggccagccaggactccctgcatgaggactctgtgcgcggcctggtgaagctcagctccgtgtgacccacatggccccaggccgggggacaccagaggctcctccatgggcagcaggagtgagcggaggggtgtgtcccacagcgactttcccagccaatgccacggtggagatgacagccccaggtctggggtacagagaccacttaggatggcacagggtggctggccccggatgctgagagcttggtttcatttgaattttcttccccaacctgagtgctttgacaacaatggaaatagagaagtggctgctttcttttggtgaccctccaggggtggaatcggagtgtgtctgcccgcccttgtgacagacacacggaaggcttctgacgcttgtggccagactgcaattgcacttatgtgttatgctactaatatttgaaacagacctgccattccatttgttaatttaaaaaaaaaaaaatcctaaagggaaaaaaccgaccaggtgtggatctgcatgccacgctgccgtctgtgttacagtggtgttgctatttccaaggaagtgctgctttctttttttttttttaattttgtgaattttcaagtgctgttttgttggaagacagtgcaacgaactgagactaatggacagtgtcatcactcagcttactgggctgaggcgtctgtggagaggtggcaccggggctgcagagggcggctggggttccgtcgtgtcgggtgtcacttcaccttctgtttggccgctcgatgaggtctcgtgttgagatattgtgtgccacaacccccacagtcttcacctccgtgtgtgatgaaacttcccgtggacagccaataaaatgacgtcctctgttattttgaaaaaaaaaa

SEQ ID NO: 428 - DNA, 3173 bp, Homo sapiens
  CDS (1)..(2997)
atgggggtcgcgggccgcaaccgtcccggggcggcctgggcggtgctgctgctgctgctgctgctgccgccactgctgctgctggcgggggccgtcccgccgggtcggggccgtgccgcggggccgcaggaggatgtagatgagtgtgcccaagggctagatgactgccatgccgacgccctgtgtcagaacacacccacctcctacaagtgctcctgcaagcctggctaccaaggggaaggcaggcagtgtgaggacatcgatgaatgtggaaatgagctcaatggaggctgtgtccatgactgtttgaatattccaggcaattatcgttgcacttgttttgatggcttcatgttggctcatgacggtcataattgtcttgatgtggacgagtgcctggagaacaatggcggctgccagcatacctgtgtcaacgtcatggggagctatgagtgctgctgcaaggaggggtttttcctgagtgacaatcagcacacctgcattcaccgctcggaagagggcctgagctgcatgaataaggatcacggctgtagtcacatctgcaaggaggccccaaggggcagcgtcgcctgtgagtgcaggcctggttttgagctggccaagaaccagagagactgcatcttgacctgtaaccatgggaacggtgggtgccagcactcctgtgacgatacagccgatggcccagagtgcagctgccatccacagtacaagatgcacacagatgggaggagctgccttgagcgagaggacactgtcctggaggtgacagagagcaacaccacatcagtggtggatggggataaacgggtgaaacggcggctgctcatggaaacgtgtgctgtcaacaatggaggctgtgaccgcacctgtaaggatacttcgacaggtgtccactgcagttgtcctgttggattcactctccagttggatgggaagacatgtaaagatattgatgagtgccagacccgcaatggaggttgtgatcatttctgcaaaaacatcgtgggcagttttgactgcggctgcaagaaaggatttaaattattaacagatgagaagtcttgccaagatgtggatgagtgctctttggataggacctgtgaccacagctgcatcaaccaccctggcacatttgcttgtgcttgcaaccgagggtacaccctgtatggcttcacccactgtggagacaccaatgagtgcagcatcaacaacggaggctgtcagcaggtctgtgtgaacacagtgggcagctatgaatgccagtgccaccctgggtacaagctccactggaataaaaaagactgtgtggaagtgaaggggctcctgcccacaagtgtgtcaccccgcgtgtccctgcactgcggtaagagtggtggaggagacgggtgcttcctcagatgtcactctggcattcacctctcttcagatgtcaccaccatcaggacaagtgtaacctttaagctaaatgaaggcaagtgtagtttgaaaaatgctgagctgtttcccgagggtctgcgaccagcactaccagagaagcacagctcagtaaaagagagcttccgctacgtaaaccttacatgcagctctggcaagcaagtcccaggagcccctggccgaccaagcacccctaaggaaatgtttatcactgttgagtttgagcttgaaactaaccaaaaggaggtgacagcttcttgtgacctgagctgcatcgtaaagcgaaccgagaagcggctccgtaaagccatccgcacgctcagaaaggccgtccacagggagcagtttcacctccagctctcaggcatgaacctcgacgtggctaaaaagcctcccagaacatctgaacgccaggcagagtcctgtggagtgggccagggtcatgcagaaaaccaatgtgtcagttgcagggctgggacctattatgatggagcacgagaacgctgcattttatgtccaaatggaaccttccaaaatgaggaaggacaaatgacttgtgaaccatgcccaagaccaggaaattctggggccctgaagaccccagaagcttggaatatgtctgaatgtggaggtctgtgtcaacctggtgaatattctgcagatggctttgcaccttgccagctctgtgccctgggcacgttccagcctgaagctggtcgaacttcctgcttcccctgtggaggaggccttgccaccaaacatcagggagctacttcctttcaggactgtgaaaccagagttcaatgttcacctggacatttctacaacaccaccactcaccgatgtattcgttgcccagtgggaacataccagcctgaatttggaaaaaataattgtgtttcttgcccaggaaatactacgactgactttgatggctccacaaacataacccagtgtaaaaacagaagatgtggaggggagctgggagatttcactgggtacattgaatccccaaactacccaggcaattacccagccaacaccgagtgtacgtggaccatcaacccaccccccaagcgccgcatcctgatcgtggtccctgagatcttcctgcccatagaggacgactgtggggactatctggtgatgcggaaaacctcttcatccaattctgtgacaacatatgaaacctgccagacctacgaacgccccatcgccttcacctccaggtcaaagaagctgtggattcagttcaagtccaatgaagggaacagcgctagagggttccaggtcccatacgtgacatatgatgaggactaccaggaactcattgaagacatagttcgagatggcaggctctatgcatctgagaaccatcaggaaatacttaaggataagaaacttatcaaggctctgtttgatgtcctggcccatccccagaactatttcaagtacacagcccaggagtcccgagagatgtttccaagatcgttcatccgattgctacgttccaaagtgtccaggtttttgagaccttacaaatgactcagcccacgtgccactcaatacaaatgttctgctatagggttggtgggacagagctgtcttccttctgcatgtcagcacagtcgggtattgctgcctcccgtatcagtgactcattagagttcaatttttatagataatacagatattttggtaaattgaaaaaaaaaaaa

SEQ ID NO: 429 - DNA, 1716 bp, Homo sapiens
  CDS (223)..(1521)
tgtcgttgttctgaggtggccaggatcccaggcagtaaattgtgcggcggggtctggatggaaaggcggggcccgctgaaagaaggcgacccgagttctgctacttcctagtaagggacgtctctggagagattctgaggtgtttgagcctcttttgcctacacaccggcagtgtccttcccgcactcagagggcctctctggagccagttccaggccacccatgggccttggccccgccccctactcatggctggcagattcgtggccccacccatctcgaagcccctcggcccaggaacccaggggaagctgctgccctagcaatcctgacccggacgacagatattacaacgaagcaggaatctccctgtatctagctcagacggccaggggcacggccgcccctggcgagggtcctgtctatagcaccattgacccagcgggggaggagctgcagaccttccatgggggcttcccccaacatccctcaggagatctgggtccctggagccagtacgctcctccagagtggagccagggggacagtggagccaagggaggcaaagtgaagcttctggggaaacctgtgcagatgccctctctgaactggccagaagccctgcccccacctcctccttcttgtgaactgagctgcctagaagggccggaggaggagctggagggcagctcagagccagaggagtggtgcccgccaatgcctgagagaagtcacctgacggagcccagctccagtggagggtgcctggtcaccccatcccgaagggaaaccccctctcccacaccttcctatggacagcagtccacagccactcttacaccctcacctcctgaccctccccagcccccaactgacatgccccatctccatcagatgcccaggagggtgccccttgggccgagttcccctctcagtgtatcccagcccatgctgggcatccgtgaagcgaggcctgctggcttgggtgctggccctgcagcctcaccccacctcagccccagtcctgcccctagcacagccagcagtgccccaggcagaacctggcaggggaatggggagatgactcccccacttcaaggaccccgtgctcgattccggaagaaacccaaggctcttccctacaggagggagaacagtcctggggacttgcccccaccacccttgccaccgccagaggaagaggcgagctgggccctagagctgagggcagcaggcagcatgtcctccctggagcgggagcgcagtggggagaggaaagcggtccaggccgtgcccctggcagcccagcgggtgctccacccagatgaagaggcctggctcccatacagcagaccaagcttcctgtcccggggccagggcaccagcacatgttccacggccggcagcaactcttccaggggctccagcagctctaggggctcccggggccctggccggagccggagtcagagccggagccagagccaaaggccaggacagaaacgccgagaggaaccaagatgacccttgttggggcattgagaatatcatgagtgccacggggaaggggagtagggatgtcttttcccccccagcagtgatgagtggggctagctgaagcccattggtttccacgatttcaattggctgagaaggcagagagctagctcctccctttctttctttttccacctgagacttgtttataaaaaaaaa

SEQ ID NO: 430 - DNA, 389 bp, Homo sapiens
  CDS (163)..(288)
  misc_feature (1)...(389): n = a,t,c or g
tgtcgttgttctgaggttccagtttctccatccttgccaacacttgttatcacttgctattttccttttaaaaacaactgtagccatcttaggaatagcttagtttttgacagaagtaaataccaaggtaattaaatttttaagttctgagtattagaggtaatggttactgtagctcctaaaatgcacatcacatctctggtaggtgctggaaccctcatggtactgctgcttttaattttgcttttggaatgtttctttgtagctgaagctttagtgatgagaagttagaaatactctcattgacctttagtgttttgtcctgtgatatatatcaagtcgcttagtttgacattgttngaacttatttcctaagcaaaaaacagcag

SEQ ID NO: 431 - DNA, 2408 bp, Homo sapiens
  CDS (229)..(519)
acatattttctaatcacatgcactcctttaccacagaggcacataatcatttggcctcatagcagttatccatggccgtactgtagtaaagttccttagaactttgccaggagtgaactagaaaaaagtgcttactagggcctaagagttgctttgtgccgtgtagtccggcctttgcactagtagatcattgctgacataggtcagtttagagacctttctgtgttaatgcctcctggtactgtcttaagatacgtacagtgtctgtttttagatctatgcatatgtcatgaagctccttgtgggctctgcatgaagctgctgctttgtttttgggttaacagatgtgcctgtcaactagcatgtgtattgtccaaattccataaacttaaggtttttaagggctgtgtggtttctgagctctatgtgtctttcctatccttgtaccttcaaagggtgagaaatgagatttatacatccaaagttagtctgataaatatggctttttgtttctccatgtaacctagactgtcaaaaataagtgatggtgataagtaggcctggagcctcagcttctgtaaatctcattcctaaaattttgctagactcgtgttggcaaaaacaaatacctgtggattgtccttaaggcttttaatcagatacctgtgttgctgttagctgaactgtagtgaagcatcgatccaaatcggtcttctgaagtatcagttatgcttttgagtttagaaaatacttaggtgttagtctagtcttcccattcatgaatcagtgtatgtccatatcagagagcctcaacttcttttttcttcctttttaaaaatgattttagtgttttgatttagtgtatactacatagttcagtattattggctttaccagtgttgacagaaaaattttaaatctccagttgcaaacagcaatggattaggatatggaaataaaatcatggtgacatcactgctgagttatcttaaacctctgctacttaattctccatattgaaatgcatactcctccacatacatggcttccaagtaaaggcaattgtagaggggccctgtctatcccagtatggttggattttaaacatatctgtgtttccgttattttgggaactgattaatatttacaattttttttgtttatgagttattttgatactaagaaaagagagaatctagaacatcttgcagttgaaatacaaattttattcttttggtcttgggagaatttaagcagtctatgcaactcatcaaatggtgagaaatagccctccgaggttccagtaagctttcagtgactttgatacctccccaagtttcttgagttgctgcttgttaacacccagcttttaactgagtgtttgctcctgatggtttaggagattttcatgttgtatcacactgtcaagttttattttgtctttttatccctccgtggatgtgagtttgaaacaagcacggtacagtaatcctgcctgatagagtagtctggaatgagaattactttttgggtgagagagttctccattttaatgtttctaaagtttttcatatgaacttggcattggaaaagggaggtaaagaaaaaggacgtttactaaaagcagtgtctactcttcccctttgtgagtgtttattcatggctaatgaaaaaaagagaaggactcttgggttttgtgttgccatgttaagcatggagagggatgcttgacagcatgctaattgaagccagagcaagtatgtccttcatcaggtaatcaggaactcttcagttgaagctgaggaactaactgattagttgttgatcataatataattggttacaaagtggaagtgccagctggcttaagtacccaaagaaaagaatgcagcagcctaacttagtgttaccatatgttactgaatttgaaactgaccttttttcccaccctacttcacacacctaaaactcttttcttgtcagaccaaagagcgaaaagaaaaaaaaaaagtaaaacactttaccaatctgtcactcaggtacaattttgtggtgagatttttgtctgttctctttgtattgctcttaagagtcctttctcagcatattattctgccattgcctctgtcttccttggggcacctcagctctggatgctacccctgggatatctactgctgttatgtgaatgataggaggtaagtgaccattatagtaagggctctttgtaaaaaaattcaaaaaatttaaaaaggatgtatacattttatagtctggctatcagtttgatatcttgctgtcaagtatgtttctcaatctgtatttatccatcccatcaataaatgttaatggtaaaacactcatttgattgttgtttatgtgtactgtcctcaaattagtccttagtc

SEQ ID NO: 432 - DNA, 2730 bp, Homo sapiens
  CDS (473)..(2086)
gactagtgattaagatgacagcagggatcgtctcctccggtctcacagctaccccgggctggagcgtggggagggggtaagggagccagccaactcggggaaacttcgttgccagagatgactggggttttcgggctttcccagccttcccatgccgggccacacggcattcattaaagtggtggggcaactattggtgcgctccagccgggcaggttttgagctgcagagacccgtgcccggtagcagcgctttgccaccgagtgcacccaggacgcagtggccgccagcccgggtctcctgctgggggccggcgagtgcagggagactttgcgccacgatgttttgttttcctgccgcaggaacgctaggcagtctctttccaccagacttaacccgcctgaagcaatagccatggaagttgcggcggcacagagggagacagaaccgcttggcgcggcatctttcttgaatgttttttctctacacagacttctttctttccttggtggccgttcccgcagcagcaccggtgtgccagcccaagagcgccactaacgggcaacccccggctccggctccgactccaactccgcgcctgtccatttcctcccgagccacagtggtagccaggatggaaggcacctcccaagggggcttgcagaccgtcatgaagtggaagacggtggttgccatctttgtggttgtggtggtctaccttgtcactggcggtcttgtcttccgggcattggagcagccctttgagagcagccagaagaataccatcgccttggagaaggcggaattcctgcgggatcatgtctgtgtgagcccccaggagctggagacgttgatccagcatgctcttgatgctgacaatgcgggagtcagtccaataggaaactcttccaacaacagcagccactgggacctcggcagtgcctttttctttgctggaactgtcattacgaccatagggtatgggaatattgctccgagcactgaaggaggcaaaatcttttgtattttatatgccatctttggaattccactctttggtttcttattggctggaattggagaccaacttggaaccatctttgggaaaagcattgcaagagtggagaaggtctttcgaaaaaagcaagtgagtcagaccaagatccgggtcatctcaaccatcctgttcatcttggccggctgcattgtgtttgtgacgatccctgctgtcatctttaagtacatcgagggctggacggccttggagtccatttactttgtggtggtcactctgaccacggtgggctttggtgattttgtggcagggggaaacgctggcatcaattatcgggagtggtataagcccctagtgtggttttggatccttgttggccttgcctactttgcagctgtcctcagtatgatcggagattggctacgggttctgtccaaaaagacaaaagaagaggtgggtgaaatcaaggcccatgcggcagagtggaaggccaatgtcacggctgagttccgggagacacggcgaaggctcagcgtggagatccacgataagctgcagcgggcggccaccatccgcagcatggagcgccggcggctgggcctggaccagcgggcccactcactggacatgctgtcccccgagaagcgctctgtctttgctgccctggacaccggccgcttcaaggcctcatcccaggagagcatcaacaaccggcccaacaacctgcgcctgaaggggccggagcagctgaacaagcatgggcagggtgcgtccgaggacaacatcatcaacaagttcgggtccacctccagactcaccaagaggaaaaacaaggacctcaaaaagaccttgcccgaggacgttcagaaaatctacaagaccttccggaattactccctggacgaggagaagaaagaggaggagacggaaaagatgtgtaactcagacaactccagcacagccatgctgacggactgtatccagcagcacgctgagttggagaacggaatgatacccacggacaccaaagaccgggagccggagaacaactcattacttgaagacagaaactaaatgtgaaggacattggtcttggactgagcgttgtgtgtgtgtgtgtgtgtgtgtttttaatattcacactgagacatgtgccttaaacagactttttagtccaaaattacatagcattgaagaatatatttcactgtgccataaacaactgaaagcttgctctgccaaaaggaatcagagaacaagaacttcatttcagatagcaaacgcaggacacaccaagagtgtccgtgcacgtagccggttctggccgtacatgttaagggcatttcagtggcagtgctgtacccctgggcagtgctacctgggcacacacgtagacaagggcagctattccttagaccagcctcctgaaagaaacaggtgtgtctttttagtggagtcgtagtaatatgtgcacacacagaaggggacctgattgggtgggagctggttatgtgtaactagcgttggagttgacattttggcatgtgctctgagcttgaattttgataccaaccattcagtgcatcatacctagtctttctatgctccaaatgaatgtctgtggggacctgagagcacctggaatttgttggaagcagatcagagcacacgtacgaaaaggtgcaattgcttttctcatgacaaaagaaaaaaaa

SEQ ID NO: 433 - DNA, 2018 bp, Homo sapiens
  CDS (1)..(1746)
atggggagcctgacgtcagccctcgcggccgccttccgcccgcccgcgcatccatctgggcctcagcgtgtcccgagcaatcacaacagcagccgcacaacaacaactcacttttacggcctccttagtggcaggcactgttctgagcgccttacgggcgttccctcctcagcatctcaccacgtgcggttcccaacaaggctacgcagaagaacccccttgactgaagcaatggaggggggtccagctgtctgctgccaggatcctcgggcagagctggtagaacgggtggcagccatcgatgtgactcacttggaggaggcagatggtggcccagagcctactagaaacggtgtggaccccccaccacgggccagagctgcctctgtgatccctggcagtacttcaagactgctcccagcccggcctagcctctcagccaggaagctttccctacaggagcggccagcaggaagctatctggaggcgcaggctgggccttatgccacggggcctgccagccacatctccccccgggcctggcggaggcccaccatcgagtcccaccacgtggccatctcagatgcagaggactgcgtgcagctgaaccagtacaagctgcagagtgagattggcaagggtgcctacggtgtggtgaggctggcctacaacgaaagtgaagacagacactatgcaatgaaagtcctttccaaaaagaagttactgaagcagtatggctttccacgtcgccctcccccgagagggtcccaggctgcccagggaggaccagccaagcagctgctgcccctggagcgggtgtaccaggagattgccatcctgaagaagctggaccacgtgaatgtggtcaaactgatcgaggtcctggatgacccagctgaggacaacctctatttggtgtttgacctcctgagaaaggggcccgtcatggaagtgccctgtgacaagcccttctcggaggagcaagctcgcctctacctgcgggacgtcatcctgggcctcgagtacttgcactgccagaagatcgtccacagggacatcaagccatccaacctgctcctgggggatgatgggcacgtgaagatcgccgactttggcgtcagcaaccagtttgaggggaacgacgctcagctgtccagcacggcgggaaccccagcattcatggcccccgaggccatttctgattccggccagagcttcagtgggaaggccttggatgtatgggccactggcgtcacgttgtactgctttgtctatgggaagtgcccgttcatcgacgatttcatcctggccctccataggaagatcaagaatgagcccgtggtgtttcctgaggggccagaaatcagcgaggagctcaaggacctgatcctgaagatgttagacaagaatcccgagacgagaattggggtgccagacatcaagttgcacccttgggtgaccaagaacggggaggagccccttccttcggaggaggagcactgcagcgtggtggaggtgacagaggaggaggttaagaactcagtcaggctcatccccagctggaccacggtgatcctggtgaagtccatgctgaggaagcgttcctttgggaacccgtttgagccccaagcacggagggaagagcgatccatgtctgctccaggaaacctactggtgaaagaagggtttggtgaagggggcaagagcccagagctccccggcgtccaggaagacgaggctgcatcctgagcccctgcatgcacccaggccacccggcagcacactcatcccgcgcctccagagggccccacccctcaatgcaacagcccggccccgcaaggccaggggggctgggtgactgcagacagcgactcccagagcatgccgctattcgagacatgaatgagcgcaactgtgcgacactgtccatgtacatgaatgaaatggatgtcagtaggaagatttggaggacgggatcccaggagccatatccatctttgcccatccttggcctacca

SEQ ID NO: 434 - DNA, 901 bp, Homo sapiens
  CDS (173)..(874)
tcattgttcctccagcgcctggcacggctgggccgaagcagagaccgtggcctgaagcgcgccatccccttcggagttgaccgaccaccaagctcttccgcccacaggtgttgtcagagctccttccaccggccggactggccgctcggccgcgcgcgggtcggccggctctatggggaaagcggcggctccgagccgaggcggcggctgtggcggccgctcccgcgggctctcgtcgctgttcacggttgtcccctgcctgtcgtgccacacggcggcgccgggcatgagcgcttccacgtccggctccgggccggagcccaagccccagccccagcccgtgcccgaaccggagcggggaccgctgtcagaacaggtgtcggaggcagtttcggaggcagtgccaagatcggaacctgtgtccgagacgacgtctgagccggagccaggggctgggcagccatcggaactgctgcaggggtcgcggccggggtcagagtcaagctcaggtgtaggggctgggcccttcactaaggccgcatcggagccgctctcccgggcggtggggagcgcgacctttctcagacccgagtcaggatcgctgccagcgttaaagcccctgcctcttctgcgaccaggacaggcgaagactcctcttggggttccaatgtcggggactggcacgacctccagtgccccactggccttactgcctctggacagcttcgagggctggcttctcaagtggaccaactatctgaagggctaccagcgccgctggttcgtgctgggcaatggtttgctctcttactacaggtatggaagcgccagggtgggacatgggggttggagggtggtgatgctgcagggatggtgatggagggcctccatggttggcgga

SEQ ID NO: 435 - DNA, 842 bp, Homo sapiens
  CDS (250)..(693)
tgtgcctggcatcagtcttgccctctcccctttggccacgcggcccttctcagcgatttgcagcagacccgcagggcagtgtgcctcggtggcattgaactgaagcttggctctcggcctggcctgctggctagttgcccaccctgtgggtcccgcccagagcaaggatactggagctttcgcctgcctcactgagcctgggtctccactccagtcatccctccagctactttgcagcactctgtcgccatgagcacctcgtctgcgcggcctgcagtcctggcccttgccgggctggctctgctccttctgctgtgcctgggtccagatggcataagtggaaacaaactcaagaagatgctccagaaacgagaaggacctgtcccgtcaaagactaatgtagctgtagccgagaacacagcaaaggaattcctaggtggcctgaagcgtgccaaacgacagctgtgggaccgtacgcggcctgaggtacagcagtggtaccagcagttcctctacatgggctttgatgaggctaaatttgaagatgatgtcaactattggctaaacagaaatcgaaacggccatgactactatggtgactactaccagcgtcattatgatgaagatgcgggcattggtccccacagccgggaaagcttcaggcatggagccagcgtcaactatgatgactattaaagcttctgaggtgcccacaagagcttgtgcctggttcaataaggccttctctacctataccacggtgacatcaggctaaaggaaagatataagtgctttttgcatttcatgcatgtggctacgaaatgctcacttaaaatagaaat

SEQ ID NO: 436 - DNA, 1016 bp, Homo sapiens
  CDS (182)..(811)
  misc_feature (1)...(1016): n = a,t,c or g
gaataaaatttatattgaattacaaactgtttgcacaaaagtcaagaaaaacttgaaagccttatatcaagaagcattcttcccatccaaacttcagtggtgcatttattttggatttgaccctctggggaaggggcatggcctctctcgacaagaaggttctggggaccaggcagagagaatgaggtctcaggatgacttccttgacagccctgttcgcctttcatcaacacacagacccagaagacctctctgtcttgtagcatctgccatgagaatcaggctcctgtgctgtgtggccttttctctcctgtgggcaggtccagtgattgctgggatcacccaggcaccaacatctcagatcctggcagcaggacggcgcatgacactgagatgtacccaggatatgagacataatgccatgtactggtatagacaagatctaggactggggctaaggctcatccattattcaaatactgcaggtaccactggcaaaggagaagtccctgatggttatagtgtctccagagcaaacacagatgatttccccctcacgttggcgtctgctgtaccctctcagacatctgtgtacttctgtgccagcagtgacggggctagcgggagtccccacaccggggagctgttttttggagaaggctctaggctgaccgtactggaggacctgaaaaacgtgttcccacccgaggtcgctgtgtttgagccatcagaagcagagatctcccacacccaaaaggccacactggtgtgcctggccacaggcttctaccccgaccacgtggagctgagctgattttttcatagactatgagcttctaaaaaatcatccccatattcgtcattacattcttgggatcaaatatactgcatgaaaaaagatgctcagaaaagtctatgttaagttaatgtagaatatatgaatgagtgaaggaaagtgttttgaaaccatcatagggaatataataagataanattacactagaataaaatgaaac

SEQ ID NO: 437 - DNA, 691 bp, Homo sapiens
  CDS (236)..(655)
cgctcgaagtcgctaggacttctctcaaacttgtgtgctgaggagactcgatgtggacctcagctcctaggctgaaatcagcagactggctcatgaaaacttgtgtactgagacaaaggaaaggatctagcagaaagcaacgtctcttatcctgggcttggcagcaaggaagaggacaagtagtggaaatccttcaatctgaaaagcaaactgaaaggtgacaaagaagctgaagatgggtggcggagagaggtataacattccagaccctcaatctagaaatgctagtaagaaccaagaacagcaaaatagacagaagagcaaggatcagaattcttcccagacgaagattgctcataagaaaaaggaacgaggacatgggtacaatccagcagcagcagcatggcaggccatgcaaaatgggggaaagaccaagagcctttctaacaactccaactggaatgctggtttatcaagtcctagcttgctttttaagtctcaagctagtcagaactatgctggagccaaatttagtgaaccaccatcaccaagtgttctccccaagccaccaagccactggggttatgtttccttgaacccttcagataaggaaacgatgacatttcaacttaaacccttacttaagggacagggataaagttagtaggcgttaacttttaattgcgacgct

SEQ ID NO: 438 - DNA, 1688 bp, Homo sapiens
  CDS (1183)..(1584)
ttattattgtgaacttagtgacaagtgtggcactattacccatttccttgtctgcccccaaccctggggtcttgggcagagaacaggagttcttgccattttctcccagctcccaccttgtgctggcttgcgggtgctgaggtcatatttgctgggtgagagggtgcaggccagatatgagccaggcctggcagagagggttttggtcagcagtgatacctgcagtgttctctgcagttggtttgggctggccctgctcctgagaactcctgggttgtcccttcaggcaaccagggaaggctccttggagcagcagcatctccccttaccactcgccgacaccagcttccgcctgacccagagaaggagtttggggacagccacagcacgtccagggctcccaaggcagctggcagagccaatgaggagaccccaacacccatccgacggctgcagctctccctgacgtgtgtcacccgcagccctggtcccagccgctgtgcttctcagggcctgcctgcccagcccgggtggatatggtgcccaggcgggccccggggacacaatgagggccattctcagagccaggcagagcgtgtggggcagtcctgtcagtcctatgtgcaacagctgggatattgtttagggagtgctggcatcaggctggggctctcctcctctggccctgccctttgggatgagcaagcccccaaaggccttcctgggttcctctggtgcacgtgccctggagttacccttctgaaggaggtagacttgtcctcctgtcctgggtgcctggggtgcaggggtgtgaattgggctatgtcaagatatgctgggcagtactgtgaggtgggggcagaggggagaaggtgtcccaggaggagccttcctggaggggatgatagtccagcatgttctgaagtgggagtagggtgcggcaggagtagggtaccagagaatgagtgagtcaggcagcagcctccactgcgccttggacacaggtggctgacagtgtccacctggactggctttgcaccccttctgaggtcacagttgtgtcccttgaaaacttgggcaggagcacctgactggcccagcttgggtcatgccctaggcccagcagtgcgggaggccaggaaagtaggcttggggaggctggcctctcctccagtttgaagcatggcaggggttccgggggaggctgctggggggcctgcgagcatgtccagagcaggaatgcttggggtggtgtgtgctttgctcgtctgggcttatctggccgtggggaagctggttgtgcggatgacgttcactgagctgtgcacgcatcatccatggagtctgcggtgtgagtccttttgccgctccagggtcacagcctgcctccctgctccagccccctggctgaggcccttcctctgccccatgctcttctcagacaggaatcctgtggaatgtcatctctttggggaggccgtctctgaccctgtatgcaaaggccttctcccacattatttttggcaccccactttcttccccgtgaaagcaaattgtttggtgtctttctgtcccactacagtataggcccggttcagacagaggccttgtccactaggcctgcgctatctctgcggagcccagccaaagcaggggccaggcgaatcttttgttaaaagaacaatgcg

SEQ ID NO: 439 - DNA, 816 bp, Homo sapiens
  CDS (13)..(399)
  misc_feature (1)...(816): n = a,t,c or g
cggcttgcgaacatgcggccccttaagcccggcgcccctttgcccgcactcttcctgctggcgctggctttgtccccgcacggagcccacgggaggccccgggggcgcaggggagcgcgcgtcacggataaggagcccaagccgttgcttttcctccccgcggccggggccggccggactcccagcggctcccggagcgcagaaatattcccaagagactctaacttaaaagacaaattcataaagcatttcacagggccggtcacattttcaccagaatgcagcaaacatttccaccgactctattacaataccagggagtgctcaacgccagcttattacaaaagatgtgctagattgttaacaagattagcagtgagtccactgtgctcccagacctagcaaaactaccctacatttcctaagaatgtacatctaatttgaagaaaaagtgcctcaaatcatgcaaaatgtaaaaaaagatgaaatttatatttttatggatattaagatgagtaaaataagagacttcccagaaataactggttagctgtttcctgtcatagaatggagnctttcttgctttatctttttgtgtatacagtaatttataattttgtaaaacagagtttgaatcgcatattgaaaattagatattaaaaattgtgtgagtgtattttatttttactagatatattattttctttatatgggtaacattctaattaaacatttaattgtgtaaattatatctgtgagtgccagtgagaaataatgacctttttgaatatgactgttagcatatatgtgccatac

SEQ ID NO: 440 - DNA, 5140 bp, Homo sapiens
  CDS (13)..(3741)
ggaggcaggaggatggagtgcagcggcggtgacctcccggagcctcccgagcccggccttctgcctaacggcaccgttaccctgctcttgagcaataacaagatcacggggctccgcaatggctccttcctgggactgtcactgctggagaagctggacctgaggaacaacatcatcagcacagtgcagccgggcgccttcctgggcctgggggagctgaagcgtttagatctctccaacaaccggattggctgtctcacctccgagaccttccagggcctccccaggcttctccgactaaacatatctggaaacatcttctccagtctgcaacctggggtctttgatgagctgccagcccttaaggttgtggacttgggcaccgagttcctgacctgtgactgccacctgcgctggctgctggcctgggcccagaatcgctccctgcagctgtcggaacacacgctctgtgcttaccccagtgccctgcatgctcatgccctgggcagcctccaggaggcccagctctgctgcgagggggccctggagctgcacacacaccacctcatcccgtccctacgccaagtggtgttccagggggatcggctgcccttccagtgctctgccagctacctgggcaacgacacccgcatccgctggtaccacaaccgagcccctgtggagggtgatgagcaggcgggcatcctcctggccgagagcctcatccacgactgcaccttcatcaccagtgagctgacgctgtctcacatcggcgtgtgggcctcaggcgagtgggagtgcaccgtgtccatggcccaaggcaacgccagcaagaaggtggagatcgtggtgctggagacctctgcctcctactgccccgccgagcgtgttgccaacaaccgcggggacttcaggtggccccgaactctggctggcatcacagcctaccagtcctgcctgcagtatcccttcacctcagtgcccctgggcgggggtgccccgggcacccgagcctcccgccggtgtgaccgtgccggccgctgggagccaggggactactcccactgtctctacaccaacgacatcaccagggtgctgtacaccttcgtgctgatgcccatcaatgcctccaatgcgctgaccctggctcaccagctgcgcgtgtacacagccgaggccgctagcttttcagacatgatggatgtagtctatgtggctcagatgatccagaaatttttgggttatgtcgaccagatcaaagagctggtagaggtgatggtggacatggccagcaacctgatgctggtggacgagcacctgctgtggctggcccagcgcgaggacaaggcctgcagccgcatcgtgggtgccctggagcgcattgggggggccgccctcagcccccatgcccagcacatctcagtgaatgcgaggaacgtggcattggaggcctacctcatcaagccgcacagctacgtgggcctgacctgcacagccttccagaggagggagggaggggtgccgggcacacggccaggaagccctggccagaaccccccacctgagcccgagcccccagctgaccagcagctccgcttccgctgcaccaccgggaggcccaatgtttctctgtcgtccttccacatcaagaacagcgtggccctggcctccatccagctgcccccgagtctattctcatcccttccggctgccctggctcccccggtgcccccagactgcaccctgcaactgctcgtcttccgaaatggccgcctcttccacagccacagcaacacctcccgccctggagctgctgggcctggcaagaggcgtggcgtggccacccccgtcatcttcgcaggaaccagtggctgtggcgtgggaaacctgacagagccagtggccgtttcgctgcggcactgggctgagggagccgaacctgtggccgcttggtggagccaggaggggcccggggaggctgggggctggacctcggagggctgccagctccgctccagccagcccaatgtcagcgccctgcactgccagcacttgggcaatgtggccgtgctcatggagctgagcgcctttcccagggaggtggggggcgccggggcagggctgcaccccgtggtatacccctgcacggccttgctgctgctctgcctcttcgccaccatcatcacctacatcctcaaccacagctccatccgtgtgtcccggaaaggctggcacatgctgctgaacttgtgcttccacatagccatgacctctgctgtctttgcggggggcatcacactcaccaactaccagatggtctgccaggcggtgggcatcaccctgcactactcctccctatccacgctgctctggatgggcgtgaaggcgcgagtgctccataaggagctcacctggagggcaccccctccgcaagaaggggaccccgctctgcctactcccagtcctatgctccgctgctggctggtgtggcgtccaagccttggcgccttctacatccctgtggctttgattctgctcatcacctggatctatttcctgtgcgccgggctacgcttacggggtcctctggcacagaaccccaaggcgggcaacagcagggcctccctggaggcaggggaggagctgaggggttccaccaggctcaggggcagcggccccctcctgagtgactcaggttcccttcttgctactgggagcgcgcgagtggggacgcccgggcccccggaggatggtgacagcctctattctccgggagtccagctaggggcgctggtgaccacgcacttcctgtacttggccatgtgggcctgcggggctctggcagtgtcccagcgctggctgccccgggtggtgtgcagctgcttgtacggggtggcagcctccgccctgggcctcttcgtcttcactcaccactgtgccaggcggagggacgtgagagcctcgtggcgcgcctgctgcccccctgcctctcccgcggccccccatgccccgccccgggccctgcccgccgccgcagaggacggttccccggtgttcggggagggccccccctccctcaagtcctccccaagcggcagcagcggccatccgctggctctgggcccctgcaagctcaccaacctgcagctggcccagagtcaggtgtgcgaggcgggggcggcggccggcggggaaggagagccggagccggcgggcacccggggaaacctcgcccaccgccaccccaacaacgtgcaccacgggcgtcgggcgcacaagagccgggccaagggacaccgcgcgggggaggcctgcggcaagaaccggctcaaggccctgcgcgggggcgcggcgggggcgctggagctgctgtccagcgagagcggcagtctgcacaacagccccaccgacagctacctgggcagcagccgcaacagcccgggcgccggcctgcagctggaaggcgagcccatgctcacgccgtccgagggcagcgacaccagcgccgcgccgctttctgaggcgggccgggcaggccagcgccgcagcgccagccgcgacagtctcaagggcggcggcgcgctggagaaggagagccatcgccgctcgtacccgctcaacgccgccagcctaaacggcgcccccaaggggggcaagtacgacgacgtcaccctgatgggcgcggaggtagccagcggcggctgcatgaagaccggactctggaagagcgaaactaccgtctaaggtggggcgggcgacgcggtagacgggctggccacgcggctcgttcccccgctcctcggggccctccaaggtgtctccgtagtcagcaggttggaggcagaggagccgatggctggaggaagcccacaggcggatgttccccacttgcctagagggcatccctctggggtagcgacagacaatcccagaaacacgcataatacatttccgtccagcccggggcagtctgactgtcggtgccctcccaggaacggggaaggcctccgtctgtgtgaaagggcacagcacatcccaggtgcaccctccccaagtactcccaccccgcctactgtccatgcggcctcactgggggccatcagcctcaccagcaaagcagagatgagagcgtgggaactgtgttctttcctccctgccctctactgatttcagcccagcccctgcctagatcctaggtcccttttcctcccgagtttggctggcacgagagctagcccagcacatgaagcaggtgatgttaagtcacaaggtgctgcttttcagatccactatgcaagaggggagggtggggccacgtgaaaggcagctctagacatcaaccagtcctgggggaggggagtgggaaccgggcacaactaggaacaatgccaccattcccacaggagtggtacttaaaccagacagcagggttcagaggtggcacaccgggacaaagctgaggccctgcacctcaacagctgactgccaggtgcctgtgggtgaactgaggggagtagagggagagggcaggtggaactggggcagaatctagtcatgccctaaagctagtcctgtaaacaatggtgccccagaaagctgcaggtggtgtttggagaagcagttacttttcagttacaagacccatctccctagtctcagccttacaacaccacgggactaaggaagagcacttccttgcctccgtaaggccagaggaagaaccatcccaatcatttgatctccagctccacagtagagagaaacctacaaaatgtcaaaccagcttcccgactcccaggagctcaagccaagcccagaggcagtggctggggtccctgcaggtcatgaggggcctatgcctttactccttttaaacaccagcacccgtcttttccccaacctaaaaccaaccaccagcatttcactacaggaccaaatggaaaccgagggaaccctgggtcttgggaagaacaacaggaaaccaaggtctgacctagggttccctcccagtcttcacatcactctggcctcatcaccaaggtgacagaggacacaggggagggggaaaacccacacacactccttggaatgggtcctgttatttatgcttgctgcacagacatattagaagaaaaaaaaa

SEQ ID NO: 441 - DNA, 3792 bp, Homo sapiens
  CDS (106)..(2253)
atgagttttccgcttcatcatctgcttctgttttctccatcttagtttgcccaaagcttgctggccgctgtgtagggctggtgagtggctggggctgtctgagccatgaacaacttcagggccaccatcctcttctgggcagcggcagcatgggctaaatcaggcaagccttcgggagagatggacgaagttggagttcaaaaatgcaagaatgccttgaaactacctgtcctggaagtcctacctggagggggctgggacaatctgcggaatgtggacatgggacgagttatggaattgacttactccaactgcaggacaacagaggatggacagtatatcatccctgatgaaatcttcaccattccccagaaacagagcaacctggagatgaactcagaaatcctggaatcctgggcaaattaccagagtagcacctcctactccatcaacacagaactctctcttttttccaaagtcaatggcaagttttccactgagttccagaggatgaagaccctccaagtgaaggaccaagctataactacccgagttcaggtaagaaacctcgtctacacagtcaaaatcaacccaactttagagctaagctcaggttttaggaaggaactccttgacatctctgaccgtctagagaacaaccagacgaggatggccacctacctggcagaactcctggtgctcaactatggcacccacgtcaccaccagtgtcgacgctggggctgctcttattcaggaggaccacctcagggcctccttcctccaagacagccagagcagtcgtagtgccgtgaccgcctctgctggacttgcctttcaaaacaccgtgaacttcaaatttgaggaaaactatacctcgcagaatgtcctcaccaagagctacctctcaaaccgaaccaactccagggtgcagagcattggaggggttcctttttacccaggcatcaccctccaggcctggcagcagggtatcaccaaccacctggtggccatcgaccgctctggcctgccgctgcatttcttcatcaaccccaacatgctacctgacttgccaggccccctggtgaagaaggtgtcaaagacagtggaaactgctgtgaagcgctattatacattcaacacctaccctggctgcacagatctcaattctcccaacttcaattttcaggccaacacggatgatggctcctgcgaggggaaaatgaccaacttctctttcggtggggtttatcaggaatgcactcagctctcagggaatagggatgtcctcctctgccaaaagttggagcagaagaatccactcactggtgatttctcctgcccctctggctactccccggtgcacctgttatcccagatccacgaggagggttacaaccacctggagtgtcatcgaaagtgcactctcctcgtcttctgcaagaccgtgtgtgaagatgtgttccaggtggcaaaagctgaatttagggctttttggtgtgtggccagcagccaagtacctgaaaactcaggactgctttttgggggcctcttcagcagcaagagcataaaccccatgacaaatgcacagtcatgcccagccggctactttccactgagactctttgaaaacctcaaggtatgtgtttctcaggactatgagttgggaagcaggtttgcggtcccctttggcgggttctttagctgcacagttgggaaccccctggtagatcctgctatatccagagatttaggggcactgtctctgaaaaagtgccccgggggcttcagccagcacccagccctcatcagcgatggatgccaagtgtcctattgcgtcaaatccgggctcttcacaggagggtccctgccccctgccaggctcccacctttcacccggccacccctcatgagtcaggctgccaccaatactgtcatagtgaccaattctgagaatgcgagatcctggattaaagactcccagacccaccagtggaggctgggagaaccgatagagctgcggagggccatgaatgtcatccatggggatggtggtggtctgtcaggaggggctgcagctggggtcacagtgggggtcaccaccattctggctgttgttatcaccttggccatctacggcacccggaagttcaagaagaaagcatatcaggcaattgaggaaaggcagagtttggttccaggcactgcagcaactggagacaccacttaccaagagcaggggcagagtccagcttaaatctctccccgaaaatggtttctctcatctccagtgtggtcattgctgaccactctgttttcctaagcattgaaatggcaagtgcaaccaaaagtaggtatattcgtgacttcttgtttaggtctctgggccaggaaattcatactgttacatggataaggttgggattggggagagggaacagttgggactagaagcaaaagtgattctgggactaaaataggaagcagatgtcctttcccaatgtgtgttgctgtcttcacctgaatgcatttgtgtaaaaatagcggagggacaatgtgaacatttgtatttggaagctatgaatttactctgaagtttgcagttgtttccaatttgtgagctctaagagtttctgcctgtaagaactactctccttttattttgatttttaaaaacctgtctgaatttcacactcttagagcctggaagagccctgaaaagacacaagtcttgcctggctactgctttttaactttgagggctctatgttgacagactgttatctcctctgggtgacctcaaacatctgaaaagaaagatgttgcctgtgccaattccactttttccagctgccccttgatgaacactcccttataccagaccactcttggacttctgactggtgtcatcaagtcctcagaaaatattttaagttattttaagttattaaggaagggatgatttggagacaaggagtaatgaaagatgggtaaaaactggaaaagattctggtgctaagtactaccccttcatcttccatggatggtcattacctttcctgtcctcctgttatatgaacacacacacacacacacacacacacgcacaccacatttcaatgtctgcatggttctgggggtaacaaaggcaagaagttaaagtaagaccacatttgagtattacttactctgtagaatcaaaacagagtagttaacaccaattatgcaaactacttttttttccagcagaaagggagctgacatgatcaaatccatgttttcaaatgaactgaaaaaggcatccagcaccacttataacacatttatttcagttccaggctgacagccctggggcatctagcaggatgcataattgtcatctggtgagagttgggactttgctcaattttaataccaatctctcctgattgtaattacctccactactttcatgatccccctacaatatttttttaaatgatatatttattcactgaatcaaatgtcattaatgagttatcttctgtggaggatgactgttctctttgttaatgttcacaatcaagatcttgggctgagaagaggcccttcacccaaggagtttgaagtatcacagcgtgtgggaaggtgggaaccaggatacccattcatttccaaccgagacacagagaagtgagtcacagaatttgagcccgctctcttgactgcccagccagagacactgatttctgtaacctcttcacttgatcctgcctcttaagcattaaaacattctcctaaacctctgagtgga

SEQ ID NO: 442 - DNA, 1107 bp, Homo sapiens
  CDS (415)..(615)
cctggggtaattcttctgccttctttcttgcatatttataaatttgtaagtgctgtgcacgtggattcttggcaagcatgtggaagcttaagcttaagatttgatttttctgatattataggccaatcactttggatattagatttttaagattgattttggaatttctcatccattagcaggttttcacctttctccttaaactcatagttttacttgaaatcatacagcatatttgtagcaatctgacagcataaatatacacaacacaaatggaacgacttatgaaggaattacttgtgaaagctcattggagtaaaatttcctctcaaacaatactttaggtcatatgactgagtctattaactatttttctgttataccctgccagaaaagaattttaaaagttagtttatgttttgtgtaaccatgttcttcagaatgcaggtatgtgagcatcatggtttctgggtaattctgctgctcctgtctttgaaaatggagataccacttgcagcttatcccactgctgagtattccagcattggtagtggtttcactccattgcatccatccagaactttcacacaggcctccccattacccagcattttttaacattgatcaataaggcctataaccagatttaggctagcaacaccagaggtctgggggcaagggtggaaattgactttacattcttagtagctaatattccataagtgctttatatatatattgttgttattgatcatctattcaaaaaatatatattgagcagctgctgtggtataggctctgtgctggccagtgaagatacatgattgacaatgttgtgcttgcttggttcacagtcctgtgggtacatggtggagtaaaataagtacaattaatttctcagagctgtgcacagcaacacacagaaggagagataactcacccagcttttgaggggtgggacagagaatgatgctagcctaccacatgtccttgtgctatctctagctgttttcacgcgttgataaaagctccaggagctggcaggattagagcagaagaacctccagcttacaacgcgcggaggccatgagaggttttcataccccg

SEQ ID NO: 443 - DNA, 928 bp, Homo sapiens
  CDS (23)..(559)
agtcgtcggccccatccgcgcgatgggctctgaggcggcgcagctgctggaggctgccgacttcgcggctcgcaagcaccggcagcagcggcggaaggaccccgaggggaccccctacatcaaccaccccatcggtgtggcacggatcctgacccacgaggcgggaatcactgacattgtggtgttacaggcggccctgctccatgacacggtggaggacacagacaccaccctggatgaggtggagctacactttggggcacaagtgcggcgcctggtggaggaggtaacagatgacaagactctgcccaagctggagagaaagaggctgcaggtggagcaagcgccccacagtagccccggggccaaactggtgaagctggcagacaagctgtacaatctgagggacctgaatcgctgcaccccagagggatggtcagaacatcgagtccaggaatacttcgagtgggcagcgcaggtggtgaaggggcttcagggaacaaaccggcaactggaagaggctctaaagcatctgttcaagcagcgggggctgacaatctgatcagtgcttgaagctatccagaggcacaactccagcctcgttcaggccggacaggattcatacgccatcttttctgtgtctcctgagctccctccatccttcccagatattagaggccaaaaaaagacttgcattttttctcagtctgaaggtctcctgctaactaagctgagccccgcgtggtgggaatcagatgtacccatccatttctgatgcactcaccgcctctccccaagtcttgggtctgtttgctattttgcatggtgggatctctggcccctcagggacttgagattatttaagtactagttcctaacacgttctggaaaataaaaataactctgggttaaggtttaaaaaaaaaaa

SEQ ID NO: 444 - DNA, 1897 bp, Homo sapiens
  CDS (404)..(829)
ggcacgaggagagcctcgagcctgcgaggagcgcgccgcccgccagctccctgcgtcccgtcccgcgtccccgcgttcccgcgtcctgcgatccgccgccatggccagtgaggagctggcgtgcaagctggagcgccggctgcggcgcgaggaggccgaggagagtggccccctagtctggctcccctctggcgccccagccccggagcccaatgcccgagcccgagcctcccgccctgtgctggcccacggccagcgccgacgcggagctgagcgcccagctgagccgtgcggctggacatcaactgagggcgctgcgctggccccggcgctgcatgggtcttcaacccctacactggagttcccggagttcagccgccgcctcatcaaggacctggagagcatgttcaaactgtatgacgctgggcgggatggcttcatcgacctgatggagctgaagctgatgatggagaagctgggggccccccagacccacctgggcctgaagagcatgatcaaggaggtggatgaggacttcgatggcaagctcagcttccgggagttcctgctcattttccacaaggccgcggcaggggagctgcaggaggacagtgggctgatggcgctggcaaagctttctgagatcgatgtggccctggagggtgtcaaaggtgccaagaacttctttgaagccaaggtccaagccttgtcatcggccagtaagtttgaagcagagttgaaagctgagcaagatgagcggaagcgggaggaggaggagaggcggctccgccaggcagccttccagaaactcaaggccaacttcaatacatagtcctgctgaccttgccctctgcccacagctgtgcctcacagatgccccgagaagagatgactaggcatcttcatcactgctgtcggtcccctccctgagccagcatctccatccaccaccccgtgccagctcccgtgccagccttcattcctcccagtgtccaagcccctccaggagggtcctggggtgggccagatgcctgcccacctctgtctcctgcctctgctcctctgcccttcttatagccagaacttgtatcttctcagcaaccttcactttgtccttgtccctttaccattccccatcaaagagtagtctgctatatcaatttgtgtagatatgtctgtctttttgggtcctcagagaaaatgcccattttctcggagaattctctgcactcctctctgcttcacattcaacttccctgttctcatctttggtaggattctgccagttgcttttgcatcttctgttcctgggtaatggtgggtcttaatggaggctgggtggaccactgcccgtccactcttcaacaggaggaacagcatgccaccacagtaacacacattagagaaaggacagaggtctgctccttcctgccacctttctcctggccccttagcattcccccagtccctccctcttcaccttgctccgtctatgtcttcccagctcagccttttccccactcttaaatactgtactacttcactgtaagaacgaaagaatagttaggataccaatgagtaaaagggttcctgttcactctgactctgtgcaaattgtattacagtagaccgctgacgttcccaagtgacagatccagggcctttcaaacatccccaaagtcatggccatactcaccattagccagtttctaacatctgtttcagggtatccagctgtagatgttcttatcccccatacttgtgagttcttggggttgctcacaaatactaggggtttttgttgtatttttaacaaatatatcctaatgtcatatttattctcttttgtaactgctgtctttacaataaagaaatcatctgcctttctaaaaaaaaa

SEQ ID NO: 445 - DNA, 603 bp, Homo sapiens
  CDS (235)..(495)
gcacgagggaacgtctgtctctgtgtctgagtaaggcgtgtgcaccggagggaggttcgggtgggcatcgggcgggtggaagagctcgactcgtcccgctgggaaagcgcgagtctgagtggaaccctggacgacttgcagagcggctggcgcagtcatggcggactactggaagtcacagccaaagaaattctgtgattactgcaagtgctggatagcagacaataggcctgtatgataattccgctgttagagattctaataataattgtgttgaatgaagtgctcctttttgatgtaaactcagtttacaaagcacttttatgtacattgctcttgcattttcaaaacatcagaagatttctgtcttctcagtcccctatgaaagctgtgagccttcttccttttcatcaacctgactttgattatatattaaattatttctctgtggccttttgggaaatgggcaatgagttggtcatatcattcatgttatgaagcacctatattataatggtggtgttcataatactgtcatacccaaagaattgtggaaagcccttaaaaaataaaagcaacatgtttagttaaaaaaaaaaaaaa

SEQ ID NO: 446 - DNA, 1629 bp, Homo sapiens
  CDS (22)..(1512)
aagagaaccctcggcggcaagatggcagcggcgggcgagggcaccccgagctcccgcgggccgcgtcgggacccgcctaggcggccgccccggaacggttatggtgtctacgtatacccaaattccttctttcgatatgaaggagaatggaaagcagggaggaagcacggtcacgggaagttgttatttaaagatggcagttattacgaaggggcgtttgtggacggagagatcacgggagaaggccgccggcactgggcctggtcaggagacaccttctctggacagtttgttctgggagagcctcaaggctacggcgtcatggagtacaaagccggcggatgttatgaaggggaggtctcccacggcatgcgggaaggacacgggtttctggtggaccgggatggacaagtgtaccagggctccttccatgacaacaagaggcacggccctgggcagatgctctttcagaacggtgacaagtacgacggcgactgggtccgggaccggcgtcagggacacggggtgctgcgctgcgccgacggctccacctacaagggacagtggcacagcgacgtcttcagtggactgggcagcatggcccactgctcaggggtcacctattatgggttgtggatcaatggccacccagcagaacaagctacgaggatcgtgatcttgggtccggaggtgatggaagtggcccaagggtctcccttctcggtgaacgttcagctgctgcaggaccacggggaaattgccaagagcgagagcggccgggtcctgcagatctcagcgggcgtcagatacgtgcagctgtcagcctactctgaggtcaactttttcaaagtggacagagacaaccaagagacactcatccagaccccatttgggttcgaatgcatcccttatcctgtgtccagccccgcagctggggtgccggggcccagagctgccaagggaggggcagaagccgacgtgcccctgcccaggggagacctggagctgcatttgggtgccctccatggccaggaggacacccctggtggcctgcttgccaggggacatgcgccccattgtcccggggcctgtcagcgagtggagcagggctgtgccgagttcacagatgtcctcctggggccgcccccgcctgggtaccaccccttcctgttcctggacagcctccacaagaaggcaggcggcagatccagaggcggcctgcaccccagggggacaccacccacggcacaggagcctcctggaggcagcaggcctgaggggagagccacggaggagcaggctgcggcagcacacctaggggagtacgtgctcatgatccgcgacgtgaccaccccgccgttcctggggcgcaggctgcccccggccttcaaacacctgcgggtcgtagcgaagagggctggccagccaccccatgtcctggaagaaggccctgaagcctcaagcagctggcaggccgcccacagctgcaccccagagccgccagcgcctcggtgaggccccgtgtccacaggaggccacctcggtgtgaatggaaggaaacgctgcctctgcttgcgtgactctgctccccgattctccagagccccgtggttgctggcttgaataaaa

SEQ ID NO: 447 - DNA, 1662 bp, Homo sapiens
  CDS (22)..(1545)
aagagaaccctcggcggcaagatggcagcggcgggcgagggcaccccgagctcccgcgggccgcgtcgggacccgcctaggcggccgccccggaacggttatggtgtctacgtatacccaaattccttctttcgatatgaaggagaatggaaagcagggaggaagcacggtcacgggaagttgttatttaaagatggcagttattacgaaggggcgtttgtggacggagagatcacgggagaaggccgccggcactgggcctggtcaggagacaccttctctggacagtttgttctgggagagcctcaaggctacggcgtcatggagtacaaagccggcggatgttatgaaggggaggtctcccacggcatgcgggaaggtctggcgcccacaggagccgggtgctgtgagggacacgggtttctggtggaccgggatggacaagtgtaccagggctccttccatgacaacaagaggcacggccctgggcagatgctctttcagaacggtgacaagtacgacggcgactgggtccgggaccggcgtcagggacacggggtgctgcgctgcgccgacggctccacctacaagggacagtggcacagcgacgtcttcagtggactgggcagcatggcccactgctcaggggtcacctattatgggttgtggatcaatggccacccagcagaacaagctacgaggatcgtgatcttgggtccggaggtgatggaagtggcccaagggtctcccttctcggtgaacgttcagctgctgcaggaccacggggaaattgccaagagcgagagcggccgggtcctgcagatctcagcgggcgtcagatacgtgcagctgtcagcctactctgaggtcaactttttcaaagtggacagagacaaccaagagacactcatccagaccccatttgggttcgaatgcatcccttatcctgtgtccagccccgcagctggggtgccggggcccagagctgccaagggaggggcagaagccgacgtgcccctgcccaggggagacctggagctgcatttgggtgccctccatggccaggaggacacccctggtggcctgcttgccaggggacatgcgccccattgtcccggggcctgtcagcgagtggagcagggctgtgccgagttcacagatgtcctcctggggccgcccccgcctgggtaccaccccttcctgttcctggacagcctccacaagaaggcaggcggcagatccagaggcggcctgcaccccagggggacaccacccacggcacaggagcctcctggaggcagcaggcctgaggggagagccacggaggagcaggctgcggcagcacacctaggggagtacgtgctcatgatccgcgacgtgaccaccccgccgttcctggggcgcaggctgcccccggccttcaaacacctgcgggtcgtagcgaagagggctggccagccaccccatgtcctggaagaaggccctgaagcctcaagcagctggcaggccgcccacagctgcaccccagagccgccagcgcctcggtgaggccccgtgtccacaggaggccacctcggtgtgaatggaaggaaacgctgcctctgcttgcgtgactctgctccccgattctccagagccccgtggttgctggcttgaataaaa

SEQ ID NO: 448 - DNA, 4871 bp, Homo sapiens
  CDS (1)..(3015)
atggcccccgcccggggccgcctgccccctgcgctctgggtcgtcacggccgcggcggcggcggccacctgcgtgtccgcggcgcgcggcgaagtgaatttgctggacacgtcgaccatccacggggactggggctggctcacgtatccggctcatgggtgggactccatcaacgaggtggacgagtccttccagcccatccacacgtaccaggtttgcaacgtcatgagccccaaccagaacaactggctgcgcacgagctgggtcccccgagacggcgcccggcgcgtctatgctgagatcaagtttaccctgcgcgactgcaacagcatgcctggtgtgctgggcacctgcaaggagaccttcaacctctactacctggagtcggaccgcgacctgggggccagcacacaagaaagccagttcctcaaaatcgacaccattgcggccgacgagagcttcacaggtgccgaccttggtgtgcggcgtctcaagctcaacacggaggtgcgcagtgtgggtcccctcagcaagcgcggcttctacctggccttccaggacataggtgcctgcctggccatcctctctctccgcatctactataagaagtgccctgccatggtgcgcaatctggctgccttctcggaggcagtgacgggggccgactcgtcctcactggtggaggtgaggggccagtgcgtgcggcactcagaggagcgggacacacccaagatgtactgcagcgcggagggcgagtggctcgtgcccatcggcaaatgcgtgtgcagtgccggctacgaggagcggcgggatgcctgtgtggcctgtgagctgggcttctacaagtcagcccctggggaccagctgtgtgcccgctgccctccccacagccactccgcagctccagccgcccaagcctgccactgtgacctcagctactaccgtgcagccctggacccgccgtcctcagcctgcacccggccaccctcggcaccagtgaacctgatctccagtgtgaatgggacatcagtgactctggagtgggcccctcccctggacccaggtggccgcagtgacatcacctacaatgccgtgtgccgccgctgcccctgggcactgagccgctgcgaggcatgtgggagcggcacccgctttgtgccccagcagacaagcctggtgcaggccagcctgctggtggccaacctgctggcccacatgaactactccttctggatcgaggccgtcaatggcgtgtccgacctgagccccgagccccgccgggccgctgtggtcaacatcaccacgaaccaggcagccccgtcccaggtggtggtgatccgtcaagagcgggcggggcagaccagcgtctcgctgctgtggcaggagcccgagcagccgaacggcatcatcctggagtatgagatcaagtactacgagaaggacaaggagatgcagagctactccaccctcaaggccgtcaccaccagagccaccgtctccggcctcaagccgggcacccgctacgtgttccaggtccgagcccgcacctcagcaggctgtggccgcttcagccaggccatggaggtggagaccgggaaaccccggccccgctatgacaccaggaccattgtctggatctgcctgacgctcatcacgggcctggtggtgcttctgctcctgctcatctgcaagaagaggcactgtggctacagcaaggccttccaggactcggacgaggagaagatgcactatcagaatggacaggcacccccacctgtcttcctgcctctgcatcaccccccgggaaagctcccagagccccagttctatgcgcaaccccacacctacgaggagccaggccgggcgggccgcagtttcactcgggagatcgaggcctctaggatccacatcgagaaaatcatcggctctggagactccggggaagtctgctacgggaggctgcgggtgccagggcagcgggatgtgcccgtggccatcaaggccctcaaagccggctacacggagagacagaggcgggacttcctgagcgaggcgtccatcatggggcaattcgaccatcccaacatcatccgcctcgagggtgtcgtcacccgtggccgcctggcaatgattgtgactgagtacatggagaacggctctctggacaccttcctgaggacccacgacgggcagttcaccatcatgcagctggtgggcatgctgagaggagtgggtgccggcatgcgctacctctcagacctgggctatgtccaccgagacctggccgcccgcaacgtcctggttgacagcaacctggtctgcaaggtgtctgacttcgggctctcacgggtgctggaggacgacccggatgctgcctacaccaccacgggcgggaagatccccatccgctggacggccccagaggccatcgccttccgcaccttctcctcggccagcgacgtgtggagcttcggcgtggtcatgtgggaggtgctggcctatggggagcggccctactggaacatgaccaaccgggatgtcatcagctctgtggaggaggggtaccgcctgcccgcacccatgggctgcccccacgccctgcaccagctcatgctcgactgttggcacaaggaccgggcgcagcggcctcgcttctcccagattgtcagtgtcctcgatgcgctcatccgcagccctgagagtctcagggccaccgccacagtcagcaggtgcccaccccctgccttcgtccggagctgctttgacctccgagggggcagcggtggcggtgggggcctcaccgtgggggactggctggactccatccgcatgggccggtaccgagaccacttcgctgcgggcggatactcctctctgggcatggtgctacgcatgaacgcccaggacgtgcgcgccctgggcatcaccctcatgggccaccagaagaagatcctgggcagcattcagaccatgcgggcccagctgaccagcacccaggggccccgccggcacctctgatgtacagccagcagggcccaggcagccaccgagcccaccccaggtcatgccagcggcagaggacgtgaggggctggcagcaggcagggcggccccaggcctctgccctcctctcgggtgctggaggagctgaaggcttcgccacaggacctggagttatcaggggtcaggcgcctgggaaggggcctttggtggccaccctggtgaggacacctgtcccccagggcaggcaccttctcttttccagagcctggggcctccacgtcacagagtccaacagggacatcactcgcctgcctctgtgtgcgtgcatgtgtgtgtgtggtggggggtgttctcacaaggtcatgggatctcatgtgaacagtgtgtgatcaagtgtgtccaccccttcgggtctcagcatggacgtgtgcatgttatgagcgtgtgcttatccgttaaggctggaggcacatgtgggtgatggtggatgatgtgtcatgaatgaggaggtgtgtgagcagggaactcagtgtgacaccgccaggtccagcacccatgggggcgggggagaggctcacccctacgtccccccacgcctggaggctggagccaggggccacttctgaactgcaccagcaccaggcccaccctcgtctctgcctgggtgagcccaccccggctgtatctcaggtctgggtcctccctctagccgaggaggccacctgcagcctccacccggctctcaccgctgcttcaacaggaaaacagggttcccggtcagtccggctggccgccttcatggaggcatcatggcagagcacatgagatgtcctcagctgggcttggctgcctggccagggccgggggctcagcagcctcctctagcctctgatgccttccctccacggcccaggtctcctcactcaaagtcccttcgccaacctttcaatgcccagccctgacacctgccctttgtcccccaggcctaggatcagggaccagaggatcctatcttctcagcacccagcccaccccttcctgtagcatatggggagactaaggcctggagagaggggtgatgccccgtcccaggttgcactgcaaccaagtgtcagagtcggggctccggcctcctgccaaggctcttgtccccatacaccatcccacaagggcgctgggggtggaagtgccctggaagcccctcccctctcacactgacctccccccttacggcccaccagggtatgtaaatatctcttttctaccatgtcagaatattttttcctcactcctgacaatgcaaaaatggtcttcaaagcacataaaaagcacccagggtgagaaagccccatcccgggggccgttggcaggcagggaagcaggaaccccaccgtgtgccccctgccagccccagagggagtggcgagcccagctgcccagccctgccccccctccccatagccagcacagctatcccgcggggacaccagcactgagccccctctccctcctgcaataattcggggagtctcagccccatccaggtgccgcggccagctctctacacctctatatattatattactatatagccgagctgttcttccttcctatggaagtcggaaacatggtcagaacacgatctgggggggggatcctgtcttcctccccaccccaccccactcttacccaatttctgggctctggatcctcacagtcatggaggcaccgtgggcctggcacttgcaaaagtgtggcccctcactctagtgtgtggtccctctcagggtcctggggatctgcctctctgtggtctccatcctgactcttgaacttacccacaataagaataaattctgcctcatcttt

SEQ ID NO: 449 - DNA, 2479 bp, Homo sapiens
  CDS (183)..(2279)
acactgcctcggttcggcaagtgggtcagttggctggggctcacttggcaacgggacgcgggaacgaggggcgcggacgcaggcccgggaggacgcggcggcgggaacctgggggcgcagggctagggcagcgggcccgacccgcacggctttcctggaaagcgctgcccctcgccgcggcgatgacctcgctgtggagagaaatcctcttggagtcgctgctgggatgtgtttcttggtctctctaccatgacctgggaccgatgatctattactttcctttgcaaacactagaactcactgggcttgaaggttttagtatagcatttctttctccaatattcctaacaattactcctttctggaaattggttaacaagaagtggatgctaaccctgctgaggataatcactattggcagcatagcctccttccaggctccaaatgccaaacttcgactgatggttcttgcgcttggggtgtcttcctcactgatagtgcaagctgtgacttggtggtcaggaagtcatttgcaaaggtacctcagaatttggggattcattttaggacagattgttcttgttgttctacgcatatggtatacttcactaaacccaatctggagttatcagatgtccaacaaagtgatactgacattaagtgccatagccacacttgatcgtattggcacagatggtgactgcagtaaacctgaagaaaagaagactggtgaggtagccacggggatggcctctagacccaactggctgctggcaggggctgcttttggtagccttgtgttcctcacccactgggtttttggagaagtctctcttgtttccagatgggcagtgagtgggcatccacatccagggccagatcctaacccatttggaggtgcagtactgctgtgcttggcaagtggattgatgcttccatcttgtttgtggtttcgtggtactggtttgatctggtgggttacaggaacagcttcagctgcggggctcctttacctgcacacatgggcagctgctgtgtctggctgtgtcttcgccatctttactgcatccatgtggccccaaacacttggacaccttattaactcagggacaaaccctgggaaaaccatgaccattgccatgatattttatcttctagaaatatttttctgtgcctggtgcacagcttttaagtttgtcccaggaggtgtctacgctagagaaagatcagatgtgcttttggggacaatgatgttaattatcgggctgaatatgctatttggtcctaagaaaaaccttgatttgcttcttcaaacaaaaaacagttctaaagtgcttttcagaaagagtgaaaaatacatgaaactttttctgtggctgcttgttggtgtgggattgttgggattaggactacggcataaagcctatgagagaaaactgggcaaagtggcaccaaccaaagaggtctctgctgccatctggcctttcaggtttggatatgacaatgaagggtggtctagtctagaaagatcagctcacctgctcaatgaaacaggtgcagatttcataacaattttggagagtgatgcttctaagccctatatggggaacaatgacttaaccatgtggctaggggaaaagttgggtttctatacagactttggtccaagcacaaggtatcacacttgggggattatggctttgtcaagatacccaattgtgaaatctgagcatcaccttcttccgtcaccagagggcgagatcgcaccagccatcacattgaccgttaacatttcgggcaagctggtggattttgtcgtgacacactttgggaaccacgaagatgacctcgacaggaaactgcaggctattgctgtttcaaaactactgaaaagtagctctaatcaagtgatatttctgggatatatcacttcagcacctggctccagagattatctacagctcactgaacatggcaatgtgaaggatatcgacagcactgatcatgacagatggtgtgaatacattatgtatcgagggctgatcaggttgggttatgcaagaatctcccatgctgaactgagtgattcagaaattcagatggcaaaatttaggatccctgatgaccccactaattatagagacaaccagaaagtggtcatagaccacagagaagtttctgagaaaattcattttaatcccagatttggatcctacaaagaaggacacaattatgaaaacaaccatcattttcatatgaatactcccaaatactttttatgaaacatttaaaacaagaagttattggctgggaaaatctaagaaaaaaagtatgtaagataaaaagaagagattaatgaaagtgggaaaatacacatgaagaacctcaacttaaaaaacacatggtatctatgcagtgggaaattacctccatttgtaaactatgttgcttaataaaaacatttctctaaaaaaaaaaa

SEQ ID NO: 450 - DNA, 2041 bp, Homo sapiens
  CDS (333)..(1955)
atcacgctgaggtccgcgcgcccccggagtctggggagcagggctccgccaatccgaggggagggcgaaggaagtaccatttatttagcgctgtgtgtgtgctcttatttccactggccttacaagaccgtgcactgtgtagatgaggaaactgagtcataataaatatgtgctgaaccgttcgggggtcacacggtgctgaaatggtttcgagtcaactcgctcggacggcactcggcctcagcctccggccctggaaccctctccagggacgggaccagcccttgttctgttccctaccggtaccacaggaatcttgacgaacggcccaaatgcctggccgctgtcagagtgacgccgcgatgagagtaaacgggccagcatcccgtgcaccagcggggtggaccagcgggagtctgcacacaggcccccgagcaggacgccctcgtgcgcaggcgcggggtgtacgtgggcggggcctcctcctccggccccgcccagcgaaggagcttcctcttccgaggaaaggcggggcctgggcgcccgcgggaaacccgggcccgttgcatccgctgggtgtagccgtggggatggcaggttcggggaggctggtcctacggccctggattcgggagctgattctggggtcagagacaccctccagtccacgagccgggcagctgcttgaggacgccgaggccgcggtcgcgggcccatcccacgcccctgatacgtccgacgtcggggccacgctgcttgtgtctgacgggacccacagtgtccgatgcctggtgacgcgggaggccctggacacctcggactgggaggagaaggagttcggcttccgcgggacagagggccggctgctgctgctgcaggactgcggggttcatgtccaggtcgctgagggcggcgcgcccgcagagttctatctccaggtggaccgcttcagcctgctgcccacggagcagccccggctacgggtgcctggtcgcaaccaagacttagatgttcagaaaaagctctatgactgccttgaggagcacctttcagagtccacctcgtccaatgcaggcctatcactgtcccagcttctggatgaaatgcgggaggaccaggagcatcagggggcactcgtgtgcctggctgaaagctgcctgacactggagggcccttgcacagcaccccctgtcacccactgggctgcctcacgatgcaaggccacgggagaagctgtgtacactgtccccagctcaatgctgtgcatctctgagaatgaccagctaattctgagctctctaggcccctgtcagaggacacagggccctgagctgcccccaccagacccggctctgcaggacctatctctgaccctcatagcctctcctccttcctcacccagttcctcaggaaccccggccttacccggccacatgtcatccgaggaaagtggtaccagcatcagccttctgcctgccctgtccttggctgctccagacccagggcagagaagcagctcccagccctcaccagccatctgctcagcccctgccaccctgacccccaggtccccacacgccagccgtacccccagctccccactccagagctgcactcccagtctctcaccccgtagccatgtccccagtccacaccaggctcttgtgaccaggccccagaaacctagcctggagttcaaggagtttgtagggttgccctgcaagaatcggccgccttttcccaggaccggagctaccaggggagcccaggagccctgctctgtctgggaacccccaaagaggcatcgtgatggttctgccttccagtatgagtatgagccaccctgcacgtccctctgtgctcgggtccaagctgtcaggcttcctccccagctcatggcctgggccttgcactttctgatggatgcacagccagggtctgagccaactccgatgtgagacgtcacgcaggacagataccgctccacactctgcttcctttgagttttttaataaaataatctcatgcggcaaaaaaaaaa

SEQ ID NO: 451 - DNA, 1142 bp, Homo sapiens
  CDS (49)..(840)
agagtgtccccctgtagacctgttagagtgctggaattcctgcagtaaatgcacaacccggacggaagtgcctctccgacagcagatccaggctcggagctccagacgctgggacaggccgcccgcagaccacccccgccgcgcgcgggacacgacgccccccgcaggacacgcccatcagcccggaaacccctgagctgcttctcccggaggccgatgcccacccgggagcccccaaagactcgcggctcccgggggcacctgcatactcacccgcctgggcctgggcccccgctgcagggactggcgccccgaggcctcaaaaccagcgccccccgccctccgtgccagccccagccgggaccccacaaggcaaagaccaagaagattgtgtttgaggatgagttgctctcccaggccctcctgggcgccaagaagcctattggagccatccctaaggggcataagcctaggccccacccagtgcccgactatgagcttaagtacccgccagtgagcagtgagagggaacggagccgctatgtcgcagtgttccaggaccagtacggagagttcttggagctccagcacgaggtggggtgtgcacaggcaaagctcaggcagctggaggccctgctgagctccctgcccccaccccaaagccagaaggaggcccaagttgcagcccgggtttggagggagtttgagatgaagcgaatggatcctggcttcctggacaagcaggctcgctgccactacctgaagggtaaactgaggcatctcaagactcagatccagaaattcgatgaccaaggagacagcgagggctccgtgtacttctaagtgcccctgcagatgggcagagggatgcatggggatgcaggtcccttgcatttcttggtatctctcagcttttcctcttgcagctccccctaccaggggtcgctttctcctggattgcaaatgcctcttcagtttggactcagctctgacagcccctcctccaggaaggccttccaggacttcctcctctgggtcctctagctctgaccctacagggactccagatctcaacctgttccctggaagtagggcctgctctccatcccagtgaaataaacatgtattagacaaaaaaaaaa

SEQ ID NO: 452 - DNA, 2678 bp, Homo sapiens
  CDS (266)..(1222)
agctggaagtcctgcggggcatgtctgtgttctgagtcagggccctgaagagatctctctgcctttgtgggctgtgcctgccatcgtgggcagctgcgcaaccgtcttggccctcctggtccttagcctgatcctgtgtaaccagtgcagggggaagaaggccaaaaatcccaaagaagagaagaaaccgaaggagaagaagaaaaagggaagtgagaacgttgcttttgatgaccctgacaatatccctccctatggggatgacatgactgtgaggaagcagcctgaagggaacccaaaaccagatatcattgaaagggaaaacccctaccttatctatgatgaaactgatattcctcacaactcagaaaccatccccagcgcccctttggcatctccagagcaggagatagagcactatgacattgacaacgccagcagcatcgccccttcggatgcagacatcattcaacactacaagcagttccgcagccacacaccaaaattttcaatccagaggcacagtcccctaggctttgcaaggcaatcccccatgcccttaggagcaagcagtttgacttaccagccttcatatggtcaaggtttgagaaccagctccctaagccactcagcatgcccaactcccaaccctctgtctcgacacagtccagcccctttctccaaatcttctacgttctatagaaacagcccagcaagggaattgcatcttcctataagggatggtaatactttggaaatgcatggtgacacctgccaacctggcattttcaactatgccacaaggctgggaaggagaagcaagagtcctcaggccatggcatcacatggttctagaccagggagtcgcctaaagcagccgattgggcagattccactggaatcttctcctccagtcggactttctattgaagaagtggagaggctcaacacacctcgccctagaaacccaagtatctgcagtgcagaccatgggaggtcttcttcagaggaggactgcagaaggccactgtctagaacaaggaatccagcggatggcattccagctccagaatcctcttctgatagtgactcccatgaatcttcacttgctcagaaatggaatatgacagggagaagccaatggtatatacttccagaatgtccaaattatctcaagtcaatgaatctgatgcagatgatgaagataattatggagccagactgaagcctcgaaggtaccacggtcgcagggccgagggaggacctgtgggcacccaggcagcagcaccaggcactgctgacaacacactgcccatgaagctagggcagcaagcagggactttcaactgggacaaccttttgaactggggccctggctttggccattatgtagatgtttttaaagatttggcatctcttccagaaaaagcagcagcaaatgaagaaggcaaagctgggacaactaaaccagtccccaaagatggggaagcagaacagtatgtgtgaagtttatgtactggcactataaaatataaaaacaagaaataatactcaaaccattgtaaagttgctgactaggttgggtcacatttgaaaaacaggccagtatggactagtggtggagggaaaactttaaaaataataaccacaatgctgctgaaacagactcacaacaactcttaatttaaacatgtgtggttgaatttatttccctgcatgcattgtgttttgtaactagttatgtggcatgcagcatttggaaaatttttcttatttaccagtgtttgatttgtgatttttaaaaattgatacctttaccattgcagaaaagaacttgtgctttcccagtggcgtatgtgtattgtttcaactgtattattataattatattttgcattgcaagattcttgatgttaaaccaatccttgtaaagtgtaaaaaggaaccctcctatcgtggaatgaaagattaagtatattaacacttttcagaatgatagtttctgtatttgatgttgctcagaaatgtctgagtatttgagtaagttttacatgacagtgggtactgaaattaagtcattttgttcagcactttaacgctttcttatagaattgtcttaaaacttctggatccttgagcaaatgattatagtctcctgactttcatgaggcttccattaggaacagaatgattgcatgttgtccccagaacactgccaccttgctatgcgaatgatgttctcagcagcacttctaagaaacactcttaaaagttatttattgaaaatttttcgtatgcttttaatattttaaagaattgacctaaggaaagcttatgattggacttattttccaaccagataacatttactctaagtacccagtttttataatttatatgaaatcagatttcaacacttactttgtcattttgtagatcattttttttaaatactgtgtaaaaactttttttacacctaagctgtgtttttgatactgatattttcctatgctgaatagttttcttactttcagggaaggtaagaaaatactttttttatatttgttacttatgtaacattcatatttttctcattttgatatttgtaacatactgtatgctttctacttgtaaatgtcaacaatagaattaaaatatttatttaaaataaaaaaaaa

SEQ ID NO: 453 - DNA, 1929 bp, Homo sapiens
  CDS (143)..(1318)
ggaggaggcggcggcggcgggcgggagcagcggcggcggcggcacaggctcggggccagccgggcgcgcatccccgggcgccctgcgcggtggagagcttggcgggctgcgggtgccgcaggacaggagtggacaaagcaagatggcagggatcttagcctggttctggaacgagaggttttggctcccgcacaatgtcacctgggcggacctgaagaacacggaggaggccaccttcccgcaggctgaggacctctatctcgcttttcccctggccttctgtatcttcatggtgcggctcatcttcgagagatttgtagccaaaccgtgcgccatagccctcaacattcaggccaatggaccacaaattgctccgcccaatgccattctggaaaaggtcttcactgcaattacaaagcatcctgatgaaaagagattggaaggcctctccaagcaactggactgggatgttcgaagcattcagcgctggtttcgacaaagacgcaatcaggagaagccaagcacgctgacgaggttctgtgagagcatgtggagattttcattttacctttatgtatttacctacggagtcagattcctgaaaaagaccccctggttgtggaatacgaggcattgctggtacaactacccctatcagccactcacaactgaccttcactactattacatcctggagctgtcgttttattggtctttgatgttttctcagttcactgatatcaaaagaaaggactttggcattatgttcctgcaccaccttgtatctattttcttgattaccttttcatatgtcaacaatatggcccgagtaggaacgctggtcctttgtcttcatgattcagctgatgctcttctggaggctgccaaaatggcaaattatgccaagtttcagaaaatgtgtgatctcctgtttgttatgtttgccgtggtttttatcaccacacgactgggtatatttcctctctgggtgttaaataccacattatttgaaagctgggagatcgttggaccttacccttcctggtgggtttttaacctactgctattgctagtacaagggttgaactgcttctggtcttacttgattgtgaaaatagcttgcaaagctgtttcaagaggcaaggctgggaagtggaaccctttacatgtgtccaaggatgatcgaagtgatattgagtctagctcagatgaggaggactcagaacctccgggaaagaatccccacactgcgacaaccaccaatgggaccagtggtaccaacgggtatctcctgactggctcctgctccatggatgattaattactcaaaactacaagtcccaagcaaagtgaactatttgttcctggaagtatttaataagttgcaaatgcagttcctttcataatatctcagcaccagaaacaaaaattaagattatcaaagcattttgaatagtgcactgccatgtgtcctgtctgtgaatgaagaagaattaccattctctctttgtaggcatgctgtatgtaattgacacaagggaacagtatttgcatttgtactgtcttagaatattatttatttttttgtatttgtaaatctgtggacaaaagagggtttcctcactccttttactcactgggctcatgacagtgaaggagatgctccatctgcttctccccctttctcttgctgtagtccaatgtgctatgagcatcagcttactttgtcacttagagcaagcaaaacccagtgcaagagtctcgttcagctctaaataggtttgctttcttttagttacagtgcccattttgaaattgcctatacagtcttagtgaccatttaaaccggacgaactaggtgtttaattttcactcttcatgttcaattagcagttcaaattaaagaagatggttattggaaaaaaaaaa

SEQ ID NO: 454 - DNA, 3758 bp, Homo sapiens
  CDS (169)..(2685)
tttcgtgcgccgcgggtcgcgccgagccgagccgagccgagcggagccggcggagcctctggaatcacccgggtcgctgttcctgagcagctgcagagcatcgagggctggagaggagcacatactgtccatggagctggtggtcaaggtggacagggggcggtggtgatggcgcagtttgacactgaataccagcgcctagaggcctcctatagtgattcacccccaggggaggaggacctgttggtgcacgtcgccgaggggagcaagtcaccttggcaccatattgaaaaccttgacctcttcttctctcgagtttataatctgcaccagaagaatggcttcacatgtatgctcatcggggagatctttgagctcatgcagttcctctttgtggttgccttcactaccttcctggtcagctgcgtggactatgacatcctatttgccaacaagatggtgaaccacagtcttcaccctactgaacccgtcaaggtcactctgccagacgcctttttgcctgctcaagtctgtagtgccaggattcaggaaaatggctcccttatcaccatcctggtcattgctggtgtcttctggatccaccggcttatcaagttcatctataacatttgctgctactgggagatccactccttctacctgcacgctctgcgcatccctatgtctgcccttccgtattgcacgtggcaagaagtgcaggcccggatcgtgcagacgcagaaggagcaccagatctgcatccacaaacgtgagctgacagaactggacatctaccaccgcatcctccgtttccagaactacatggtggcactggttaacaaatccctcctgcctctgcgcttccgcctgcctggcctcggggaagctgtcttcttcacccgtggtctcaagtacaactttgagctgatcctcttctggggacctggctctctgtttctcaatgaatggagcctcaaggccgagtacaaacgtggggggcaacggctagagctggcccagcgcctcagcaaccgcatcctgtggattggcatcgctaacttcctgctgtgccccctcatcctcatatggcaaatcctctatgccttcttcagctatgctgaggtgctgaagcgggagccgggggccctgggagcacgctgctggtcactctatggccgctgctacctccgccacttcaacgagctggagcacgagctgcagtcccgcctcaaccgtggctacaagcccgcctccaagtacatgaattgcttcttgtcacctcttttgacactgctggccaagaatggagccttcttcgctggctccatcctggctgtgcttattgccctcaccatttatgacgaagatgtgttggctgtggaacatgtgctgaccaccgtcacactcctgggggtcaccgtgaccgtgtgcaggtcctttatcccggaccagcacatggtgttctgccctgagcagctgctccgcgtgatcctcgctcacatccactacatgcctgaccactggcagggtaatgcccaccgctcgcagacccgggacgagtttgcccagctcttccagtacaaggcagtgttcattttggaagagttgctgagccccattgtcacacccctcatcctcatcttctgcctgcgcccacgggccctggagattatagacttcttccgaaacttcaccgtggaggtcgttggtgtgggagatacctgctcctttgctcagatggatgttcgccagcatggtcatccccagtggctatctgctgggcagacagaggcctcagtgtaccagcaagctgaggatggaaagacagagttgtcactcatgcactttgccatcaccaaccctggctggcagccaccacgtgagagcacagccttcctaggcttcctcaaggagcaggttcagcgggatggagcagctgctggcctcgcccaagggggtctgctccctgaaaatgccctctttacgtctatccagtccttacaatctgagtctgagcccctgagccttatcgcaaatgtggtagctggctcatcctgccggggccctccactgcccagagacctgcagggctccaggcacagggctgaagtcgcctctgccctgcgctccttctccccgctgcaacccgggcaggcgcccacaggccgggctcacagcaccatgacaggctctggggtggatgccaggacagccagctccgggagcagcgtgtgggaaggacagctgcagagcctggtgctgtcagaatatgcatccacagagatgagcctgcatgccctctatatgcaccagctccacaagcagcaggcccaggctgaacctgagcggcatgtatggcaccgccgggagagtgatgagagtggagaaagcgcccctgatgaagggggagagggcgcccgggccccccagtctatccctcgctctgctagctatccctgtgcagcaccccggcctggagctcctgagaccaccgccctgcatgggggcttccagaggcgctacggtggcatcacagatcctggcacagagcccagggttccctctcatttctctcggctgcctcttggagggtgggcagaagatgggcagtcggcatcaaggcaccctgagcccgtgcccgaagagggctcggaggatgagctaccccctcaggtgcacaaggtatagacaaggctgagcagggttcctgtggcccaggatggaggccaccgctgccctgccatcccgtctgcctgccatgggacggctcctctgagtgttccctggccccacgtgtgtggtgtttgtgtgtctgtgcctggccaagggaggtgccaacactgggcttgccacagccccaggagaggaatttggggcctaggaaccgagggcacacgggactctagcctcatccccagaacccccttggctcagagtgtggtgctagaaactggtccccagcccagccccagtactgccacctttacacctacccctgcaagtccccagagggctgcccacgatagaagctgccaagcagggagaacctgtgccaactgtggagtggggaggttgggcctggaccctcaacccctgcaaccttccctagccccctcaatagatgagcaggtcaggctgtggcccttacctcacccgcagttctcgcccagtgctgcagccggctcacctctctccgcttcttgcacatcactggcctgtgtgtgctgcttgctcctgttctgttcgcttgctcccgttccgttcggcttttgctttgcgttagggtgaagaccctagcgtccagctcccctcaacgctatattttgacactaaaaaagaaggtttctaaattgtaggagcaggatggaaatactttgctgcccttgccatcttttaggatgggcccccaggagactgaggtcttcctgggccctcattgctgcttatcgtaccccccatcacctgcacatgggacagaccgggctggagggtgaccttggctgtgtacgtcccagcaaaagagctctggcccgcatctcgctgccctgaagggggatgaagggcgatgcctcgcccgaggctttgggctgctgcactgcatgctgggactgctcctactctctgtcccacccctcacccagctgtggtccggctttgggagagtggtgaattgcgctgcccgaactcggagcggagcagggtagggaccgtgtacagcttgataacccttaataaaaagggggttttaaaaaaaaaaa

SEQ ID NO: 455 - DNA, 2763 bp, Homo sapiens
  CDS (80)..(2449)
tttcgttgctgattgaggtcggcagctcccgagaagcaggagaagcagagtttttgcagacagacccacgaagtcaagcatgcggagtgcagccaagccctggaacccagccatcagagcagggggccacggcccagaccgggtgcggcctctgcctgcagcctcttccggcatgaagagttctaagtcttcaacttccttggcttttgagtcccgactcagcaggctcaagagggccagcagtgaggacacgctcaacaagccaggaagtaccgctgcatcgggggtggttcgcctgaagaagaccgccactgccggagccatctcggagctcacggagagccgcctgaggagcggcacaggggcctttacaacaactaaacggacaggcattccagccccacgggaattttcagtaactgtctcaagagagaggtctgtgccacgtggtccctccaaccccaggaaatcagtgtccagtccaacttcttccaacactcccactcctacgaaacacctgaggaccccttccacaaagcccaagcaagagaatgaaggtggagaaaaggctgcgcttgagtcccaagttcgggaacttttggcagaagccaaagcaaaagatagtgaaattaacaggcttcgaagtgaactaaagaaatacaaagagaaaaggactctgaacgctgaggggactgatgctttgggcccaaatgtcgatggaacatcagtctccccaggtgacacggaacctatgataagagctcttgaggagaagaacaagaactttcagaaagagctttccgatctagaggaagaaaaccgggtcctgaaggagaaactgatctatcttgagcactccccaaattcagaaggggcagcaagtcacactggcgacagcagctgcccaacatccataactcaagagtcaagcttcggaagcccaactggaaatcagttgtccagtgacattgatgagtataaaaaaaacatacatggaaatgcattacggacatcaggctcctcaagtagcgatgttaccaaagcttctttgtcgccagatgcttccgactttgagcacattacagcagagacaccctcaaggcccctgtcctccaccagtaacccctttaagagttcaaagtgttctactgctgggagttccccaaacagcgtaagtgaattgtccctggcttccctcacagagaagatacaaaagatggaagaaaaccaccatagcactgcagaagaactacaggctactctacaagaattatcagaccagcaacaaatggtacaggaattgacagctgaaaatgagaagctggtggatgaaaagacgattttagagacatcctttcatcagcatcgagagagggcagagcagctaagtcaagaaaatgagaagctgatgaatcttttacaagagcgagtaaagaatgaagagcccaccactcaggaaggaaaaattattgaactggagcagaagtgcacaggtattcttgaacagggccgctttgaaagagagaagctactcaacattcagcagcagttgacctgtagcttgcggaaggttgaggaagaaaaccaaggagctttagaaatgattaaacgtctgaaggaagaaaatgaaaaactgaatgagtttctagaactggaacggcataataataacatgatggccaaaactttggaagagtgtagagttaccttggaagggctaaaaatggagaatggatctttgaagtctcatttgcagggtgagaagcagaaagccacagaggccagtgctgtggagcagacggcagagagctgcgaagttcaagaaatgttgaaagtagcccgagcagagaaagatctactggaactgtcttgcaatgagctcagacaagaattactaaaggcaaacggtgaaattaaacatgtttccagtctgctggccaaggtggaaaaggattattcatacctgaaggagatatgtgatcaccaagccgaacagctgagcagaaccagcctaaagctgcaagaaaaagcatcagagagtgatgcagagatcaaagacatgaaagaaaccatatttgaattggaagatcaggtggaacagcaccgggctgtcaagttacacaataatcaactcatcagtgagctagaaagtagtgtgatcaagctggaggaacagaagtcagacctggagaggcagctgaagactctgaccaagcagatgaaggaggagaccgaggaatggaggcggttccaggcggatctgcagaccgcagtggtggtggccaatgacatcaagtgtgaggcccagcaggagctgcgcaccgtgaagaggaaactgctggaggaggaggagaagaatgcccggttgcagaaggagctgggggatgtgcagggccacggcagggtggtcaccagcagagccgcccctccctccctgggctctgtcagctagcagagcatttggtggaagaaagacagcccagctcttgccatgattgggagccgcagccatctctagatgaaagggggaatgtgtagaggagaaattgcctctttataaagagcccagtttgtctccttgtgacattctctgtttctcagagtcattgccgtcgagtctctgctttttgtccacattttgggatcagcttactgcatgatcaaagatgatgtttccctctttttacttttcctcagaagattgagctgtcttttatttggagaataaaatgaagttctgaaaaaaacaaaaaaaaaaaaaaa

SEQ ID NO: 456 - DNA, 3511 bp, Homo sapiens
  CDS (75)..(2921)
aagacaacgtcactagcagtttctggagctacttgccaaggctgagtgtgagctgagcctgccccaccaccaagatgatcctgagcttgctgttcagccttgggggccccctgggctgggggctgctgggggcatgggcccaggcttccagtactagcctctctgatctgcagagctccaggacacctggggtctggaaggcagaggctgaggacaccagcaaggaccccgttggacgtaactggtgcccctacccaatgtccaagctggtcaccttactagctctttgcaaaacagagaaattcctcatccactcgcagcagccgtgtccgcagggagctccagactgccagaaagtcaaagtcatgtaccgcatggcccacaagccagtgtaccaggtcaagcagaaggtgctgacctctttggcctggaggtgctgccctggctacacgggccccaactgcgagcaccacgattccatggcaatccctgagcctgcagatcctggtgacagccaccaggaacctcaggatggaccagtcagcttcaaacctggccaccttgctgcagtgatcaatgaggttgaggtgcaacaggaacagcaggaacatctgctgggagatctccagaatgatgtgcaccgggtggcagacagcctgccaggcctgtggaaagccctgcctggtaacctcacagctgcagtgatggaagcaaatcaaacagggcacgagttccctgatagatccttggagcaggtgctgctaccccacgtggacaccttcctacaagtgcatttcagccccatctggaggagctttaaccaaagcctgcacagccttacccaggccataagaaacctgtctcttgacgtggaggccaaccgccaggccatctccagagtccaggacagtgccgtggccagggctgacttccaggagcttggtgccaaatttgaggccaaggtccaggagaacactcagagagtgggtcagctgcgacaggacgtggaggaccgcctgcacgcccagcactttaccctgcaccgctcgatctcagagctccaagccgatgtggacaccaaattgaagaggctgcacaaggctcaggaggccccagggaccaatggcagtctggtgttggcaacgcctggggctggggcaaggcctgagccggacagcctgcaggccaggctgggccagctgcagaggaacctctcagagctgcacatgaccacggcccgcagggaggaggagttgcagtacaccctggaggacatgagggccaccctgacccggcacgtggatgagatcaaggaactgtactccgaatcggacgagactttcgatcagattagcaaggtggagcggcaggtggaggagctgcaggtgaaccacacggcgctccgtgagctgcgcgtgatcctgatggagaagtctctgatcatggaggagaacaaggaggaggtggagcggcagctcctggagctcaacctcacgctgcagcacctgcagggtggccatgccgacctcatcaagtacgtgaaggactgcaattgccagaagctctatttagacctggacgtcatccgggagggccagagggacgccacgcgtgccctggaggagacccaggtgagcctggacgagcggcggcagctggacggctcctccctgcaggccctgcagaacgccgtggacgccgtgtcgctggccgtggacgcgcacaaagcggagggcgagcgggcgcgggcggccacgtcgcggctccggagccaagtgcaggcgctggatgacgaggtgggcgcgctgaaggcggccgcggccgaggcccgccacgaggtgcgccagctgcacagcgccttcgccgccctgctggaggacgcgctgcggcacgaggcggtgctggccgcgctcttcggggaggaggtgctggaggagatgtctgagcagacgccgggaccgctgcccctgagctacgagcagatccgcgtggccctgcaggacgccgctagcgggctgcaggagcaggcgctcggctgggacgagctggccgcccgagtgacggccctggagcaggcctcggagcccccgcggccggcagagcacctggagcccagccacgacgcgggccgcgaggaggccgccaccaccgccctggccgggctggcgcgggagctccagagcctgagcaacgacgtcaagaatgtcgggcggtgctgcgaggccgaggccggggccggggccgcctccctcaacgcctcccttgacggcctccacaacgcactcttcgccactcagcgcagcttggagcagcaccagcggctcttccacagcctctttgggaacttccaagggctcatggaagccaacgtcagcctggacctggggaagctgcagaccatgctgagcaggaaagggaagaagcagcagaaagacctggaagctccccggaagagggacaagaaggaagcggagcctttggtggacatacgggtcacagggcctgtgccaggtgccttgggcgcggcgctctgggaggcaggatcccctgtggccttctatgccagcttttcagaagggacggctgccctgcagacagtgaagttcaacaccacatacatcaacattggcagcagctacttccctgaacatggctacttccgagcccctgagcgtggtgtctacctgtttgcagtgagcgttgaatttggcccagggccaggcaccgggcagctggtgtttggaggtcaccatcggactccagtctgtaccactgggcaggggagtggaagcacagcaacggtctttgccatggctgagctgcagaagggtgagcgagtatggtttgagttaacccagggatcaataacaaagagaagcctgtcgggcactgcatttgggggcttcctgatgtttaagacctgaaccccagccccaatctgatcagacatcatggactcgcccagctctcctcggcctggggctctggccaaggatgggctggaggtcattcagttggtctgtctcttccctggaaaccttctgcaaagatggtgtggtgtacgtggcttccctgtaaccacatggggcttggccatttctccatgatgagaaggactggaatgcttctccgggcaggacatggtcctaggaagcctgaaccttggcttggcatgccttctcagacagcacggcctgggctccaactcttcaccacaccctgtattctacaacttctttggtgttttgctcctcctgtggttggaaacttctgtacaacactttaaacttttctcttgcttcctcttctcttctcccttatcgtatgatagaaagacattcttccccaggaggaatgtttaaaatggaggcaacattttggccaacattggaaagcactagagggcaatgggattaaaccaacctgcttggtctctattagtcagtaatgaagacgacagcctggccaaccaagggaaaggaaattagtatctttagtttcagtcattcct

SEQ ID NO: 457 - DNA, 5279 bp, Homo sapiens
  CDS (99)..(3767)
ccctctggctgctctgcctggtcgcgtgctggctcctgggcgccggggccgaagccgacttctccatcctggacgaggcgcaagtgctggcgagccagatgcggaggctggcggccgaggagctgggggtcgtcaccatgcagcggatattcaactcctttgtttacactgagaaaatctcaaatggagaaagtgaagtacagcagctagccaaaaaaatccgagagaagttcaaccgttacttggatgtggtcaatcggaacaagcaagttgtagaagcatcctatacggctcacctaacctctcccctaactgcaattcaagactgctgtactatcccaccttccatgatggaattcgatgggaactttaataccaatgtgtctagaacaattagttgtgatcgactttctactactgttaatagccgggccttcaatccaggacgagacttaaattcagttcttgcagacaacctgaaatccaaccctggaattaagtggcaatatttcagttcagaagaaggaattttcactgttttcccagcacacaagttccggtgtaagggcagctacgaacaccgcagtagacccatctacgtctctacagtccggccgcagtcaaagcacatagtagtgattctggaccacggggcttcagtcacagacactcagcttcagattgccaaggacgctgctcaggtcatcctcagcgccatcgatgaacatgacaagatttctgtgttaactgtggcagataccgtccggacttgctcactagaccagtgctataagaccttcttgtctccagccaccagtgagacaaaaaggaaaatgtccacctttgttagcagcgtgaagtcttcagacagtcctacccagcacgcagtgggattccaaaaggcatttcagctgattcgaagtacaaacaataacacaaagttccaagcaaatacagacatggtcatcatttacctgtcagctggcattacatcaaaggactcttcggaagaagataaaaaagcgactctccaagtcatcaatgaagaaaatagctttctaaacaactctgtaatgattctcacctatgccctcatgaacgatggggtgactggtttgaaagagctggcttttctgagggatctagctgaacagaattcagggaagtacggtgtgccagaccggacggccttgcctgtgattaagggcagcatgatggtgctgaatcagttgagcaacctggagaccacagtgggcaggttctacacaaaccttcccaaccggatgattgatgaagccgtcttcagcctgcccttctctgatgagatgggagatggtttgataatgactgtgagtaaaccctgttattttggaaacctacttctgggaattgtaggtgtggacgtgaatctggcttacattcttgaagacgtgacgtattaccaagactctttggcttcctatacttttctcatagacgacaaaggatatacacttatgcacccatctcttaccaggccatatttattgtcagagcccccacttcatactgacatcatacattatgaaaatattccaaaatttgaattagttcggcaaaatatcctaagcctccctctgggcagccagattatcgcagtccctgtgaactcatccctgtcttggcacataaacaagctgagagaaactggaaaggaagcctacaatgttagctatgcctggaagatggtacaagacacttcctttattctgtgtattgtggtgatacaaccagaaatacctgtgaaacaactgaagaacctcaacactgttcccagcagcaagctgctgtaccaccggctggatctccttggccagcccagtgcttgcctccacttcaaacagctggcaaccctagaaagtcccaccatcatgctgtctgctggcagcttttcctccccctatgagcacctcagccagccagagacaaagcgcatggtagagcactacaccgcctatctcagcgacaacacccgcctcattgctaacccgggcctcaaattctctgtcagaaatgaagtaatggctaccagccacgtcacagatgaatggatgacacaaatggaaatgagtagcctgaacacttacattgtccgccgttacatagcaacacccaatggcgtcctcagaatttatcctggttccctcatggacaaagcatttgatcccactaggagacaatggtatctccatgcagtagctaatccagggttgatttctttgactggtccttacttagatgttggaggagctggttatgttgtgacaatcagtcacacaattcattcatccagtacacagctgtcttctgggcacactgtggctgtgatgggcattgacttcacactcagatacttctacaaagttctgatggacctattacctgtctgtaaccaagatggtggcaacaaaataaggtgcttcataatggaggacaggggttatctggtggcgcacccgactctcatcgaccccaaaggacatgcacctgtggagcagcagcacatcacccacaaggagcccctggtagcaaatgatatcctcaaccaccccaactttgtaaagaaaaacctgtgcaacagcttcagtgacagaacggtccagaggttttataaattcaacaccagccttgcgggggatttgacgaaccttgtgcatggcagccactgttccaaatacagattagcaaggatcccaggaaccaacgcgtttgttggcattgtcaacgaaacctgcgactctcttgccttctgtgcctgcagcatggtggaccgactctgtctcaactgtcaccgaatggaacaaaatgaatgtgaatgtccttgtgagtgccctctagaggtcaatgagtgcactggcaacctcaccaatgcagagaaccgaaaccccagctgcgaggtccaccaggagccggtgacatacacagctattgaccctggcctgcaagatgctcttcaccagtgtgtcaacagcaggtgcagtcagaggctggaaagtggggactgttttggggtgctggattgtgaatggtgcatggtggacagtgatggaaagactcacctggacaaaccctactgtgccccccagaaagaatgcttcggggggattgtgggagccaaaagtccctacgttgatgacatgggagcaataggtgatgaggtgatcacattaaacatgattaaaagcgcccctgtgggtcctgtggctggagggatcatgggatgcatcatggtcttggtcctggcggtgtatgcctaccgccaccagattcatcgccggagccatcagcatatgtctcctcttgctgcccaagaaatgtcagtgcgtatgtccaacctggagaatgacagagatgaaagggacgacgacagccacgaagacagaggcatcatcagcaacactcggtttatagctgcggtcatcgaacgacatgcacacagtccagaaagaaggcgccgctactggggtcgatcaggaacagaaagtgatcatggttacagcaccatgagcccacaggaggacagtgaaaatcctccatgcaacaatgaccccttgtcagccggggtcgatgtgggaaaccatgatgaggacttagacctggataccccccctcagactgctgccctactaagtcacaagttccaccactaccggtcacaccaccctacacttcatcatagccaccacttacaggcggccgtcacggtacacactgtcgatgcagaatgctaacaatctcctcacctccacgccaagatgagatctgggagctacagaatgttctggaaagaaaaagaaccggcttaaaacccacagcaagagacctcccttgtgtttgtgctttgtgcagagttgtttgagtcatttcctgcctgtcgacatggttaaaaacgagagaaacaacaacacagtcacatttgtgaagatgtgaggctggttctgaaatggaggggaaataagcctgatgaacagacctgccataacactaatggaaggtaacagaaggcgaacctccaaacacagagacggaacctgcaagtgaagctgagccagaggaatgttccaaagagccagaagcattcagctctccttaactggaagagagaaaaatctgctcacccagagactggaatgtggcacatgcagatacaaatgtgtgcattgaagatttcgctttgtttcttagcggtacctggataccacagttgctgtatggaactcatgttatgctctaaacgatgcatctcagaatttctaagtaaaggattatttttctactatttattgaactttcaaacattctcaaactttggggaaaaggaaaggaaacacaggagaagttttcagcagttgccccgagctgttttgtgtgtaatgaagtggttctttgattaaggagctctatttcttatttaactgatatcccactgccccactccacaaaataggaaaatgaagaaatctttctctctgacttgtttacatcatttcacggaaacacatctttgtttgtaatgcagtattctttctctgtgtttgacagagatggggaggggcagaggaatttaagaggttttaaaagaaatgttatgtttcttatgacttgtttccactcctcgtacaatgctattcttaggtttctacgaaacctaatgttagaaccgcatcctttcagctaagggagggttggatttattttccttgttttagagactacaaatttttaaatatcccattttgactgagaatattgacatataagggaagaagttttctaaattgtgaaagtctggttcttaattaaagaattttttttttaatatcacggttaaaagctgctgccagttagccaagacattatccaccaaattgctttgtgatttatacagggattaatcaaatctggctactataacatggggcattgtaactttaaagtagtgttttaattacagtgatgtattttagactcacattttgtgattcaaatatgttataaaggcattcttgcaccatggtaaagaatgtgtgtggtaaatctccgtttatatgtagttggaaaaaattcactgaataatgttttaatgatagggtattatgatacaatgtaaaaaacaattggttcttcagcagtacagaaagtaaactatatatgtgctatcaggaaaccccttcatactgtgtataaaattgcaatctagtgaaataaaccgtatgcaatggaccattaaaaaaaaaaaa

SEQ ID NO: 458 - DNA, 2431 bp, Homo sapiens
  CDS (59)..(2017)
gggctccggagcacatgctgagcggagctgtgctggggctgctgcggcgtggcggagcatgcgctcgctccctcgctcactcgctcgctcgcagtggacacacgcaggggctgacagctgtgctggtgctgataagggaagccacaaggagacgatcgaggagagagacaagcggcagcagaggcagcagcggcagaggcagcaccagggctgcggagctgctgggagtgggagtgactcccccacctcgggcccccaccctgtccctgtcctcttcccgcttgccctgagtttagaagagcagccgctgccaccactgccactcgggagggcaccagggctgctggctagggagggacagggcagggaggctctggccagtcccagcagccggggacagatgccgatcgagattgtgtgcaaaatcaaatttgctgaggaggatgcgaaacccaaggagaaggaggcaggggatgagcagagcctcctcggggctgttgcccctggagcagccccccgagacctggccacctttgccagcaccagcaccctgcatggactgggccgggcctgtggcccaggcccccacggactgcgcagaaccctgtgggcactggccctactcacctcgctggctgccttcctgtaccaggcggctggcctggcccggggctacctgacccggcctcacctggtggcaatggaccccgctgccccagccccagtggcgggcttcccggctgtcaccctctgcaatatcaaccgcttccggcattcggcactcagcgatgccgacatcttccacctggccaatctgacagggctgccccccaaagaccgggatgggcaccgtgcggctggcctgcgctacccagagcctgacatggtagacatcctcaaccgcactggccaccagctcgccgacatgcttaagagctgcaacttcagtgggcatcactgctccgccagcaacttctctgtggtctatactcgctatgggaagtgttacaccttcaacgcggacccgcggagctcgctgcccagccgggcagggggcatgggcagtggcctggagatcatgctggacatccagcaggaggagtacctgcccatctggagggagacaaatgagacgtcgtttgaggcaggtattcgggtgcagatccacagccaggaggagccgccctacatccaccagctggggttcggggtgtccccaggcttccagacctttgtgtcctgccaggaacagcggctgacctacctgccccagccctggggcaactgccgcgcagagagtgagctcagggagcctgagcttcagggctactcggcctacagtgtgtctgcctgccggctgcgctgtgaaaaggaggccgtgcttcagcgctgccactgccggatggtgcacatgccaggcaatgagaccatctgcccaccaaatatctacatcgagtgtgcagaccacacactggactccctgggtgggggccctgagggcccgtgcttctgccccaccccctgcaacctgacacgctatgggaaagagatctccatggtcaggatccccaacaggggctcagcccggtacctggcgaggaagtacaaccgcaacgagacctacatacgggagaacttcctggtcctagatgtcttctttgaggccctgacctctgaagccatggagcagcgagcagcctatggcctgtcagccctgctgggagacctcgggggacagatgggcctgttcattggggccagcatcctcacgttgctggagatcctcgactacatctatgaggtgtcctgggatcgactgaagcgggtatggaggcgtcccaagacccccctgcggacctccactgggggcatctccactttggggcttcaggagctgaaggaacagagtccctgcccgagcctgggccgagcggagggtgggggggtcagcagtctgctccccaatcaccaccacccccacggtcccccaggaggtctctttgaagattttgcttgctaggacggtgctgtgactgaaaggacccaggagtctgggacccctcctgggatccccagcacattctcctgctcctgggagaggcctgggggcggtgctcactgggagggccaggactcagttcctgctctcatcctcccctgccctgatgtcagctgctttgcacaaaggtccttcttgtccacaccccttatccccaggctggtgccccgggagggctggagaccaggccatgggccctcacggagaggaagggaaggaaggagagggagggggaggatagagcccatcccagccggggagggggagccctctgtacatttgtaaatatttagggaaagccgggtggggggaggggatacagatgtagaaggtgggtagggctacaggggtgggtgatttagggacagccag

SEQ ID NO: 459 - DNA, 1866 bp, Homo sapiens
  CDS (66)..(1022)
gatttcgtattgttatttagtttttatttcataatcataaacttaactctgcaatccagctaggcatgggagggaacaaggaaaacatggaacccaaagggagctgctatcggctggcggcccacaagctgcttaaggagatggtgctgctggagcggctgcggcaccccaacgtgctgcagctctatggctactgctaccaggacagcgaggacatcccagacaccctgaccaccatcacggagctgggcgcccctgtagaaatgatccagctgctgcaaacttcctgggaggatcgattccgaatctgcctgagcctgggccgcctcctccaccacctggcccactccccactgggctccgtcactctgctggacttccgccctcggcagtttgtgctggtggatggggagctcaaagtgacggacctggatgacgcacgtgtggaggagacgccgtgtgcaggcagcaccgactgcatactcgagtttccggccaggaacttcaccctgccctgctcagcccagggctggtgcgagggcatgaacgagaagcggaacctctataatgcctacaggtttttcttcacatacctcctgcctcacagtgccccgccttcactgcgtcctctgctggacagcatcgtcaacgccacaggagagctcgcctggggggtggacgagaccctggcccagctggagaaggtgctgcacctgtaccggagcgggcagtatctgcagaactccacggcaagcagcagtaccgagtaccagtgtatcccagacagcaccatcccccaggaagactaccgctgctggccatcctaccaccacgggagctgcctcctttcagtgttcaacctggctgaggctgtggatgtctgtgagagccatgcccagtgtcgggcctttgtggtcaccaaccagaccacctggacaggtcggcagctggtctttttcaagactggatggagccaagtggtccctgatcccaacaagaccacatatgtgaaggcctctggctgacctatctgagggctcggctgaccagctgactatcctcagcagctgggcttgcctgtggagggagtgacttgcactggcagcactgcatgtcacctgggaacccctgcagacaaagctaacatcccagacagacagatgtgaccaggacaaacgtgcaataatgccaaatgttaaaatgtgagtttaccagcctagctatgggactgctggctcctagtccaggaatcatgggggtatgactgcctctccaaccctgtgggctgtaagcaagctcaggctagtctccccactgggggctgtgcccctccctgggacggttccgtgggcagccccatcactgtgttcaatagtgtgagaatgtagctaaagcccctgctgctgctgctgcacatgccacagcaggcggtgggggctgcgtggggacaatccatcgtggagtgttctctcagcttaggtctggacaggagacttggcgggagatgctccaggatgtgggtgattctgtacctggggaggctatctctgacctcccgacaggggacactcccaggccagcccaggggtcaggggcagaggtgcacacctcagcatgagccaagactggggtcagggagcaggtgtggtttgagccaggacctggggcgggggtggggccggggcctttctgcctcatttgctttcaatgaaagcctcaaagcagccaaaaccaggctttcccccttcctcgagtttgaatatccagaatcttttgtacttcttgttggttaaattgtttatttttgtaaaaaataaaataaaattagttaataaaatgatgtttcacagcaaaaaaaaaaaaaaa

SEQ ID NO: 460 - DNA, 916 bp, Homo sapiens
  CDS (125)..(631)
aaggatccttaattaaattaatcccccccccccccccgagtgtgctgagctctccgcgtcgcctctgtcgcccgcgcctggcctaccgcggcactcccggctgcacgctctgcttggcctcgccatgccggtggacctcagcaagtggtccgggcccttgagcctgcaagaagtggacgagcagccgcagcacccgctgcatgtcacctacgccggggcggcggtggacgagctgggcaaagtgctgacgcccacccaggttaagaatagacccaccagcatttcgtgggatggtcttgattcagggaagctctacaccttggtcctgacagacccggatgctcccagcaggaaggatcccaaatacagagaatggcatcatttcctggtggtcaacatgaagggcaatgacatcagcagtggcacagtcctctccgattatgtgggctcggggcctcccaagggcacaggcctccaccgctatgtctggctggtttacgagcaggacaggccgctaaagtgtgacgagcccatcctcagcaaccgatctggagaccaccgtggcaaattcaaggtggcgtccttccgtaatgactatgtgcccaaactgtacgagcagctgtctgggaagtagggggttagcttggggacctgaactgtcctggaggccccaagccatgttccccagttcagtgttgcatgtataatagatttctcctcttcctgccccccttggccatgggtgagacctgaccagtcagatggtagttgagggtgacttttcctgctgcctggcctttataattttactcactcactctgatttatggtttgatcaaatttgaacttcattttggggggtattttggtactgtgatggcggcatcaattattaatctgacaatagcaccccagg

SEQ ID NO: 461 - DNA, 3214 bp, Homo sapiens
  CDS (514)..(3138)
cgactctgtggatcccctgcctgctgtcgctaggacagctctcctggcttgctagattaatggccagcgtgtctcaagactcgaatcacggggctgtgaccgagaactctttggcggagggcatttcatagaccttaaggactctcagtgaaatgagacactatcaaaggctgcctgattatgtggagccgatttgcgcattgaatatcagaggaaaagaattatgtgcggcagtgttaggacagcaccagtaccgagctctgtcagagagcatgctcaccacaagagagtttttgaaggaaattagttatgagcttatcacaggaaaggtcagtttcctggcatcacatttcaaaaccacatcattaggcgatgacctagacaagctgctggaaaaaatgcaacaaagaagaggagacagtgtggttacccctttcgatggagaccttaatgaatgtgtgtcaccccaggaggctgctgctatgattcccacacaaaacctggatttagataatgaaaccttccacatttatcaaccgcagcaacagttgccagaaaactcttatcccaggtgtgtgctatagcggacagtggcagccagagcctggacctcggtcacttcagcaaagtagacttcatcatcattgttcccagatcggaggtgttggttcagcaaactcttcagcggattcgacaatcagtgtcatttcaggctctttgtcacatagcgaacccagtcatgggctagctgatagagtcattaattgcagagaagttctggaagctttcaacctcctggtgctccaggtcagctccttcccatacactctgcagacccaacagtcccgcattagctctagcaatgaggttcactggatacagctggatactggggaggacgtgggctgcgaggagaagctgtactttggcttgagtgagtacagcaagtctctgcagtgggggatcacgagcccacttctgagatgtgacgagacttttgaaaaaatggtgaacacactcttggagaggtaccccaggctgcacagcatggtcgtccgctgctatcttctcatccagcagtactctgaggccctgatggctctcaccaccatggcgtcactccgcgaccacagcacaccagaaacactcagcattatggatgacctcatcagctccccaggcaaaaacaaaagtgggaggggacatatgctcattatcagggtgccctcggtgcagctggcgatgttagccaaggagcggctacaggaggtgcgcgacaaactgggtctgcagtatcggtttgagatcatccttgggaacccggccaccgaactcagtgttgcaactcactttgtggcgcgattaaagagttggagaggaaatgaaccagaagagtggatccctcggacataccaagatttagacggtctaccttgtattgtgatattaactggcaaagatcctcttggagaaacctttcccaggtctttgaagtactgtgacctccggttaattgactcaagctatttaactcgcacggccttggagcaggaggtgggtctggcatgctgctatgtctcaaaagaggtcatccggggacccactgttgccctggacctcagcgggaaggagcatgagagagctgctgtcagtgagaatgactccgatgagctgctcatcgacctggagcggccccagagcaacagcagcgctgtcacagggacctcgggttccatcatggagaatggagtgagctcttccagcacagctgacaagtcccagaagcagtccctgacccccagctttcagagcccagccaccagcttggggctggatgaaggggtctccgccagctcagctggagccggagccggggagactctgaagcaggagtgtgactccctgggcccccagatggcgagcagcaccacctccaagccgtcatcatcatcctcaggacccaggaccctcccatggccgggacagcccatcagaggctgccggggcccacaggcagccctgccaccagtggtgatcctatccaaagcggcctacagtctcctgggctcccagaagagtggcaagctgccatcctcctcctccctgctgccccacgccgacgtggcctgggtgagctccctgcggccactcctgaacaaggacatgagcagtgaggagcagtccctctactacaggcagtggaccttggcccggcagcaccacgctgactatagcaaccagctggacccggcctctggcacccgaaacttcctcccccgacggctcctgctgacagggcccccacaggtgggaaagacgggctcctatttacagttcctcaggatcctcttccgcatgctcatcaggctcctggaggtggacgtgtatgatgaggaggagatcaacaccgatcacaatgaaagcagtgaagtgagccagtcagagggagagccctggcctgacatcgagagcttcagtaaaatgccttttgatgtcagtgtgcatgaccccaagtacagtttgatgagcctggtgtatactgagaagctggcaggggtcaaacaagaagtgataaaggaatccaaagttgaagagcccaggaaacgggaaactgtatccataatgctgaccaaatatgcagcctataacacctttcaccactgtgaacagtgccgccagtacatggacttcacctctgcctcccagatgtctgactccacccttcatgccttcacattctcttcttctatgctgggagaagaggttcagctctatttcatcattcccaaatccaaagagagtcattttgtcttcagcaagcagggcaagcacctggagagcatgcggctgcccctggtttcagacaagaatttgaatgcagtcaagagccctattttcactccttccagtggtcgacatgagcacggactcctaaaccttttccacgccatggagggcatcagccaccttcacctcctggtggtcaaagagtatgagatgcctctgtaccgcaagtactggcccaaccacatcatgctggtgcttcccggcatgttcaataatgcaggcgtgggtaaggggcccccctgggatggggagaagggcttcgaagataaactgagctccattcccctggcatgaaactttcagattcccctgcctctagaaattgtcctgccctcctcaccactcttcggaaaaaaaaaaaaaaaag

SEQ ID NO: 462 - DNA, 2897 bp, Homo sapiens
  CDS (63)..(1037)
cggtctcgtgccggctttccaggaccctcagggagagcgggcagccttccaggtggacagaaatggactcagaactcaaggaagaaattcctgtgcatgaggaattcattttgtgtggtggagccgaaacccaggttctaaaatgtgggccctggacagacctctttcatgatcaaagtgtcaaaaggcctaagctgcttattttcattattcctggtaacccaggtttttctgccttttatgtgccatttgcaaaggctttatactctttgacaaacagacgctttccagtttggactatcagtcatgctgggcatgcgttggctcccaaagacaagaagattcttacaacatcagaggattcaaacgctcaagaaattaaggacatttatggactaaatggacaaatagagcacaaactagctttcctgagaactcatgtgccaaaggacatgaaacttgtgctcattggccattcaataggcagctatttcacacttcagatgctgaagcgagtccctgagctcccggtaattcgtgcctttctgctctttccaacaattgaacgaatgtctgagtcacccaatggcagaattgccactccacttttgtgctggtttcgatatgttctctatgttactggctacttattattgaaaccgtgtcctgagacaatcaagtccttgctaatcagaaggggccttcaagtaatgaacctagagaatgaattttcaccattgaatatattagaaccattctgccttgctaatgctgcctaccttgggggccaagaaatgatggaggtggtgaagagagatgacgaaaccataaaggagcatttatgtaagcttacattttattatggtactatagatccttggtgtccaaaagagtactatgaagacattaagaaggattttccagaaggagacattcgactctgtgagaaaaacatacctcatgctttcatcacccattttaaccaggaaatggcagacatgattgctgactccctaaaggatgacttgtccaaaatgtaaattggcctgaggaacaagcccccactgccagtacatggaggcagtcagtgtactagacttagtaggtaaatgtttaattttgaagactgatattagaaatgaagaaagtgagaacctttgtcttacaaaccaactctccgctcgccatgttataggctgaagtaaacacagttgatgaatcattccataggtttaaccatacattttccaagactcagggaacacagtgatctacacagagtcttgtgtttgcacaagatgcccagtggcaccatatggtttattttggtaggcaggatctttgcagatgaaaaaaaaatctacatgtacttgattttaattgagttacattgtagaataggctcctctggaggaaattatgaaatacctactagaaaatgtaaaataaatcagtgaatgttaagagtatagttagatatgtgaagtgtatgagattatgacaaggatacactcatgttccaggagcaggaagtgaacctgggtctcctgtaagacagaagatgaagatgagcccaggctaacttagcacagatcttggctgagatcatcaatgtgacgtctaatgtacctgcactagacagagaataaagttcaccagacattactctggtcagctaaccagataaagaattgttgaaggaccccaactgtgcctcctgccacaggacaaccagcaagttctatgctgagccttagcctcccaggttataagctccctgcaggctcctcctctccagagccaggatggagaggcactgggctgtcccaaagcaggcttggatgtgccaacgtacagttgctccttctgtaattcttgcactaaaactccattaaagaccatcaatgagccaaatagtgtgctagccattgaggatggagttcttagctacttaatgattcttttcttctggaaatcttctagtgaataatttttaaaagcttcttttaaactgctcagtaaaacattgccatacattaactctccatttctgcattaacttcatttgctggaaagaaattattttgttaatgaaccaaacccagccattaagttatgtgaattcaccttctctagacacattgaggtatggcagagaagacacatattccctggcctagagtgggctgacaatattgctgcctcccctaaattgactcaatcttgagaaccacatactgcagtgacagttgatcatggatcagaaatattcctttttctcctagaggaaatccctcatggcattatcattccctaaggacaatgagatgtccctccgctcaaatcctaaagccccctgatgaaagatttggctctgatttgctgccaacttattggtaagtgctgaatgagttactgtgctttggcatagcttctacatcacagcaagtgacttctcagaggggaaaagccaagctccagacaaggagtgctgttagcccaaggggaagagctaatagatacataggccgtaagcacagggctgtacacagatcctttattggcatctgcatgagaggcctagaaatcggatgttagaagctaggaatcatggctctgagcgccttgcatacaggagatactcactgatactaaatcaaggcatgtaaacaatactgggtaaatcatacctaccagaataaagagtaacattcagagcttttcttttatctgttattttaaatgttactccatatttcaaaagtctgcacgtatgaaattgtgtcttatttctggtttttagagcctaagaaagatactcattcttaattcctatttatcatctgaaaaccaaatgaacttttgaaataaatgttttaccagcaaaaaaaaaaaaa

SEQ ID NO: 463 - DNA, 2540 bp, Homo sapiens
  CDS (478)..(1824)
tttcgtggcgggagcccgggcggccggtttgaactccgtgcacgcgggcctggagctgcgcccctgcgtcttttcccgacttctgatccgcagaggggcactcggagccccagcctgggtcgcagtgccttcggtctgcgggcctcagtttctcggtggcgcctggactctcgccctcagagggaggcccgtcccacggtctgtggctacggatcccaggaccctcttcgcgggcgattcgcgtagcctcagattgcctcggatgatggcctgcgactgacagtctctcagctcttctcagctctcctgaggctgcagctgtcagctccctgatcctcagcacttgcctggaccagtgcgggtctgccacgccctgttcagccatccctgtcctgttgtgtcgtgcaagccacatctgtccacacccccaccacccaccagtgctggctctcctctcttctcccctgtgctcccagcatgcctcgtggccggtgccgtcagcagggccctcgcattcccatctgggcagccgccaattatgccaacgcacatccatggcagcagatggacaaggcgtctcctggggtggcatacaccccccttgtggatccctggattgagcggccctgctgtggggacaccgtgtgtgtgcgaacgaccatggagcagaagagcacagctagtggcacttgtggcggtaaacctgcagaaaggggtcccctagctgggcacatgcccagctcccgaccccacagggtggacttctgctgggtaccaggctcagacccaggcacctttgatggctccccgtggctactggaccgcttcttggcccagctgggcgattacatgtccttccactttgagcactatcaggacaacatcagccgtgtctgcgagatcctcaggcgcctaacaggccgagcccaggcctgggcagccccctaccttgatggggacctgcccctgcctgacgattacgagctcttctgccaggatctcaaggaagttgttcaagacccgaacagttttgctgagtaccatgctgtggttacctgtcccctgcccctggcctccagccagctgccagtggcccctcagctgcctgtggtgaggcaatacttagctaggttcttagagggcctggcactcgacatgggtactgcccccaggtctttaccagccgccatggccacccctgctgtgtctgggtccaactctgtatctagaagtgctctgttcgagcagcagctgaccaaggagagcacccctgggcccaaggagcccccagtcctgcccagttctacatgtagctccaagcctggtcctgtggaaccagcctcttcccagccagaggaggcagcccccacacctgtccctagactgtcggagtcagctaatcctcctgcccagagaccagacccagctcatccaggaggtccaaaaccccagaaaacagaggaggaggttttggagacagagggagaccaggaggtgtccttaggtaccccacaggagctggaatgtgaggaaggctgcctggaggaagtggccactttgattctgggggatgagtgggatagcatcttggcaaagaatgatgtttcctgtgggattaccagcagttctgggcagctggaaggtttggatgcaggaaggtgggatgcaagccccttgccaggctcagctgcaggcattcgccctttgtgtgttaacactgtagctctaatcgtgcctggtgttctgaagcaggctcctcttccctgctgctgtgctgccatcccctgctcactccgcactcgcatgcattgcggattcagcacttaagccctagtgtgtaaatgacttggatctccctcctggcagactgtgaccctcagcacaggggctctgtcttagtcagctctgtggcctggtacacaattggtgctcattaaacacgtgttggattactggctgaggtggtgcagtggctgcctaccagcaagtctttgtttcccattctgtcaggagcagaggcctggccatgagcattccaggtcagcattgcagctgtggtttctggcaggggctttgagggtccaagggtctgatcaaagaagctgggtggggctgagtagggggtgggtggctctgcaggtagagaactgacttccgagagctgtaggtgaagtgaggaccaggcagcagtccagagctgtgaggccccaggcccagaggaatggaatgaagaaagacctgttccacacaaggaggggttttctagtggaagctgagcttggaagctcctggagccaagtttaccacaggataggcaggtacagccgcccagtgtgtgcagtgtgtgcccactctggtgcttggacaagaagttcaagtccctttcaggtttacaattgtgaaaacaacaaaacaataccttcctggaaagtaggaagacaaagcagaaatgtgaattggaaatacagccaactattttaggaaaaactaattagcaagcatctgattaaacttattcagatactgaaaaaaaaaaaaaa

SEQ ID NO: 464 - DNA, 3394 bp, Homo sapiens
  CDS (88)..(2268)
aagctgatccgcgtctgcggtcggtcggtgcgtgcgtgcgcctcgtcggtccgcgtgtctggccgagagcccccttcctctgcggccatgactccgccgccgccgccgccccctcccccgggccctgaccccgcggccgaccccgccgcggacccctgcccctggcccggatcactggtcgtcctcttcggggctacggcgggtgcgctgggacgggacctgggctcggacgagaccgacttaatcctcctagtttggcaagtggttgagccgcggagccgccaggtggggacgctgcacaaatcgctggttcgtgccgaggcggccgcactgagtacgcagtgccgcgaggcgagcggcctgagcgccgacagcctggcgcgggcagagccgctggacaaggtgctgcagcagttctcacagctggtgaacggggatgtggctttgctgggcgggggcccctacatgctctgcactgatgggcagcagctattgcgacaggtcctgcaccccgaggcctccaggaagaacctggtgctccccgacatgttcttctccttctatgacctccgaagagaattccatatgcagcatccaagcacctgccctgccagggacctcactgtggccaccatggcacagggtttaggactggagacagatgccacagaggatgactttggggtctgggaagtcaagacaatggtagctgttatcctccatctactcaaagagcccagcagtcaattgttttcgaagcccgaggtgataaagcagaaatacgagacggggccttgctctgacagcactgtgccctgcccctacagcagcaaggctgatgtggtggacagtgagactgtggtacgggctcgtgggttgccgtggcagtcatcagaccaggacgtggctcgcttcttcaaagggctcaacgtggccaggggtggtgtagcactctgcctcaacgcccagggccgcagaaatggcgaggccctcatccgctttgtggacagcgagcagcgggacctagcgctgcagagacacaagcaccacatgggcgtccgctatattgaggtgtataaagcgacaggggaggagtttgtaaagattgcagggggcacatcactagaggtggctcgtttcttgtcacgggaagaccaagtgatcctgcggctgcggggactgcccttctcggctgggccaacggacgtgcttggcttcctggggccagagtgcccagtgactgggggtaccgaggggctgctctttgtgcgccatcctgatggccggccgactggtgatgccttcgccctctttgcttgtgaggagctggcacaggctgcactgcgcaggcacaagggcatgctgggtaagcgatacattgaactcttccggagcactgcagccgaagtgcagcaggtcttgaaccgctatgcatccggcccactccttcctacactgactgccccactgctgcccatccccttcccactggcacctgggactgggagggactgtgtacgcctccgaggcctgccctacacggccaccattgaagacatcctgagctttctgggggaggcagcagctgacattcggccccacggtgtacacatggtgctcaaccagcagggccggccatcgggcgatgccttcattcagatgacatcagcagagcgagccctagctgctgctcagcgttgccataagaaggtgatgaaggagcgctacgtggaggtggtcccctgttccacagaggagatgagccgagtgctgatggggggcaccttgggccgcagtggcatgtcccctccaccctgcaagctgccctgcctctcaccacctacctacaccaccttccaagccaccccaacgctcattcccacggagacggcagctctatacccctcttcagcactgctcccagctgccagggtgcctgctgcccccacccctgttgcctactatccagggccagccactcaactctacctgaactacacagcctactacccaagccccccagtctcccccaccactgtgggctacctcactacacccactgctgccctggcctctgctcccacctcagtgttgtcccagtcaggagccttggtccgcatgcagggtgtcccatacacggctggtatgaaggatctgctcagcgtcttccaggcctaccagctacccgctgatgactacaccagtctgatgcctgttggtgacccacctcgcactgtgttacaagcccccaaggaatgggtgtgtttgtaggagagaaagccaggaggtaagagccagctgatatcctcggcgaacatgtctctcctgagtccagaagaccagcaccctcaacctggtagcttctttctggcttgtcaaagctctcagaaggtacctagaggagcccaagccccagctccatcctccacttattctgcctgtttcccccaaagacaatggctggaccctgcatgcagggctgggggtggaatggggctaaccagctcctgatggcctgagccaggcatcttgactggcacctggagagcccttaagtctgtcctggctgtggcccatgccgacagatatcgtggggctgacaggtccacggcaggcttgctttcttttataaaatggaagctctggtaccttcaatgtatgactcctgggagaatcaagggtccatctgagcctctgagtaaagatcccaatgttctacctctccctgtccctcttgtaggggatagggaggcagagagagccagcccctaccctcagagtatctggacctcagagaccatgttgtgccaggggtggtcccacctaaagatgctagcccctctccaggtgggcataaggagtaacagatggcaaaaccacaaactattttgatggactgtgctgcagtatcaccagaagacattagggggcagtaggcccccacacaaaaccttcaggcttgaattttaaaggggaggactttctgccaacttttcttgtatgccttgggaaagccagttgccctgaacccagcagacaccatggaatgtcctttgcacgcattaaatggtacagaactgaagcctcggaagcaatttggaactcgatcttctcttccttaaatgaaaagttattgaccaaatggactttttaaaagacacaggacccttaactttgccccaaagtgaggggctccacaccaaccccaggcggaggaacactcagacagattaaggatactgttgacctgtcactgtttattatttcagcactaaaactgaggagcctcaactgctggctcttcttccctttgtatttgtgtaaggagcactgcactcccataaaaggttttaaaatacaaaatgtacaagaacacacaattccaaaaaaaaaa

SEQ ID NO: 465 - DNA, 1354 bp, Homo sapiens
  CDS (366)..(1121)
accacgctgcaggaattcggcacgaggccaaaccaaagagaagtttttatgctgccagggatttgtacaagtaccgacaccagtacccaaacttcaaagatatccgatatcaaaatgacttgagcaatcttcgtttttataagaataaaattccattcaagccagatggtgtttacattgaagaagttctaagtaaatggaaaggagattatgaaaaactggagcacaaccacacttacattcaatggcttttccccctgagagaacaaggcttgaacttctatgccaaagaactaactacatatgaaattgaggaattcaaaaaaacaaaagaagcaattagaagattcctcctggcttataaaatgatgctagaattttttggaataaaactgactgataaaactggaaatgttgctcgggctgttaactggcaggaaagatttcagcatctgaatgagtcccagcacaactatttaagaatcactcgtattcttaaaagccttggtgagcttggatatgaaagttttaaatctcctcttgtaaaatttattcttcatgaagctcttgtggagaatactattcccaatattaagcagagtgctctagagtattttgtttatacaattagagacagaagagaaaggagaaagctcctgcggttcgcccagaaacgctacacgccttcagagaactttatctggggaccgcctcgaaaagaacagtcggagggaagcaaagcccagaaaatgtcttcccctctcgcctccagtcataacagtcaaacttctatgcacaaaaaagccaaggactccaaaaattcctcctcagctgttcatttaaatagcaaaacagctgaagacaaaaaagtggcaccaaaagagcctgtggaagagacagacaggcccagcccagagcccagcaatgaagctgccaagccaagaaatacagagaaggacagtaatgctgagaacatgaattctcaacctgagaaaacagttactactcccacagaaaaaaaggagagtgtatctcctgagaataacgaagaaggtggaaatgataaccaagacaatgaaaatcctggaaatacaaattgccatgatgttgtactagtacagtgaattatcagaaaacccagaagccagtttaggctagagaggaaaaaactactgtatcatttatcctaaagaacagagatgaggtcaatttcaaattttagccatctgtttgtgatttctgtcataagcattttgttgtttgtttttttattttggatgacaatgaattgaatatctaataaggagatttaagataagacccaataaatgaatgtattctgtaaaaaaaaaaa

SEQ ID NO: 466 - DNA, 2787 bp, Homo sapiens
  CDS (1)..(2784)
atggagaagttagaagttttagaggaatggcagtctcacattgaaggctgggaggggtccaacatcactgacacctgcactgaaatgctaatgtgtggagtcttactgaaaatttcttctggaaatattcaagaacgggtgttttttcttttcgataatcttttggtgtactgcaaaagaaaacacagacggttgaagaacagcaaggcatctacagatggacatcggtacctttttcgtggccggatcaacacggaggtgatggaagtggagaatgtggatgatggcaccgctgatttccatagcagtggacacattgttgttaatggatggaagatacataacacagcaaaaaataaatggtttgtttgtatggcaaaaacacctgaagagaagcatgaatggtttgaagctattttgaaagaaagagaacggcggaaaggtttaaaattaggaatggagcaagatacctgggtcatgatctctgaacagggtgagaaactttataaaatgatgtgcagacaaggaaatctgatcaaagaccgaaagagaaaactgactacgttccctaaatgctttcttggaagcgaatttgtgtcatggctgttggaaattggagagattcacaggcctgaggaaggcgtgcacttgggacaagcattattagaaaatggaatcattcaccatgttactgataaacatcaattcaaaccagaacagatgttatatagatttcgctatgatgatggaacattttatccaagaaatgagatgcaggacgtgatttcaaagggtgtaagattatattgtcgtcttcatagcctttttactccagtgataagagataaagattaccatttaaggacctacaaatctgtggtcatggccaacaaactgatagactggttaattgcacagggagattgccgcaccagagaagaggcaatgatatttggcgttggactctgtgacaatggatttatgcaccatgtccttgaaaaaagcgaattcaaagatgaacccctacttttccgttttttttcggatgaggaaatggagggatcaaatatgaaacatcgacttatgaaacatgacttaaaagttgtggaaaatgttatagctaagtcattattgattaaatccaatgaaggcagctatggctttgggctagaagacaaaaataaagttccaataataaagttggtagaaaagggatctaatgctgagatggctggcatggaagtcgggaaaaagatttttgctattaatggtgacctagtttttatgagacctttcaatgaagtggattgcttcctgaaatcgtgtttaaacagcagaaaacctctaagagttcttgtgagcacaaagccaagagagacagtgaaaattccagattcagctgatggacttggcttccagatccggggatttggcccttctgttgtgcatgctgtaggaagaggaactgtggctgcagcagctggtcttcaccctggacagtgcattatcaaggtgaatggaatcaatgtcagcaaagagacacatgccagtgtcattgcacacgttacagcctgcaggaagtacaggcggccaacgaagcaagattccatacaatgggtttataatagcattgagagtgctcaagaagaccttcaaaaatctcactccaagccccctggagatgaagcaggggatgcttttgactgtaaagtagaagaggttattgacaaattcaacactatggccatcattgatgggaagaaggagcatgtgagtctgacagtggacaatgtccacctggaatatggtgtcgtgtatgagtacgacagcacagctggcatcaagtgcaatgtggtggaaaagatgattgagcccaaaggtttcttcagcttaactgccaagattcttgaagccctggctaaaagtgatgagcattttgtacaaaactgtaccagcctaaattctctaaatgaagtgattcctactgaccttcagagtaaattcagtgccctttgcagtgaaagaattgaacacctatgtcagagaatatccagttataaaaagttttctcgtgtactgaagaatagggcctggcctacttttaaacaggccaaatctaaaatctccccactgcacagcagtgatttctgccctaccaactgccatgtcaatgtgatggaagtttcttatcccaaaacatcaacctctttgggaagtgcatttggtgttcagttggatagcaggaagcataattctcatgataaagaaaacaaatcttcggagcaagggaaactgagccctatggtgtacattcagcacaccatcacaaccatggcggccccttcaggtctgtctctgggacagcaggatggccatggtctcaggtatctgctaaaagaagaagacttagaaacccaagacatctatcagaaactgctgggcaaacttcagactgcactgaaagaggtggagatgtgtgtttgtcaaatagatgaccttctgtcttcaataacatattctcctaaattagagcgtaagacatcagagggcataataccaacagacagtgacaatgtgaagggagaaagaaacagcaaacgggtatgttttaatgtagcaggagatgaacaggaagattctggtcatgacaccatcagcaacagagactcttacagtgactgcaacagcaataggaattccatcgcctccttcaccagcatctgcagcagccagtgcagctcgtatttcacagtgatgaaatggactcaggtgatgaacttcccttaa

SEQ ID NO: 467 - DNA, 2173 bp, Homo sapiens
  CDS (140)..(1852)
ggcagctccgccgctttccaaggccgagtatctgaagcgttacttgtccggggcagatgccggcgtcgaccggggatctgagtccggtcgcaagcgtcgcaaaaagcggccgaagcctggcggggccggcggcaagggaatgcggattgtggatgatgatgtgagctggacagctatctccacaaccaaactagaaaaggaggaagaggaagatgatggagatttgcctgtggtggcagagtttgtggatgagcggccagaagaggtaaagcagatggaggcctttcgttccagtgccaaatggaagcttctgggaggccacaacgaagacctaccctcaaacagacattttcgtcacgataccccggattcatctcctaggagggtccgtcatggtaccccagatccatctcctaggaaggaccgtcatgacaccccggatccatctcctaggagggcccgtcatgacaccccagatccttctcccctcagaggggctcgtcatgactcagacacatctcctcccaggaggatccgtcatgactcctcagacacttcacccccaaggagggcccgtcatgattctccagatccttctcccccaaggaggcctcagcataattcttcaggtgcatctcctaggagagtccgtcatgattcaccagatccctctcctcctaggcgagcccgtcatggttcctcagatatctcttcccccagaagggtccataacaactcccctgacacatctaggaggactcttggctcttcagacacacagcaactcagaagggcccgtcatgactcccctgatttggctcctaatgtcacttattccctgcccagaaccaaaagtggtaaagccccagaaagagcctctagcaagacttctccacattggaaggagtcaggagcctcccatttgtcattcccaaagaacagcaaatatgagtatgaccctgacatctctcctccacgaaaaaagcaagcaaaatcccattttggagacaagaagcagcttgattccaaaggtgactgccagaaagcaactgattcagacctttcttctccacggcataaacaaagtccagggcaccaggattctgattcagatctgtcacctccacggaatagacctagacaccggagctctgattctgacctctctccaccaaggaggagacagaggaccaaatcttctgattctgacctgtccccgcctcgaaggagtcagcctcctggaaagaaggctgcacacatgtattctggggctaaaactgggttggtgttaactgacatacagcgagaacagcaggagctcaaggaacaggatcaagaaaccatggcatttgaagctgaatttcaatatgctgaaaccgtatttcgagataagtctggtcgtaagaggaatttgaaactcgaacgtttagagcaaaggaggaaagcagaaaaggactcagagagagatgagctgtatgcccagtggggaaaagggcttgcccagagccggcaacagcaacaaaatgtggaggatgcaatgaaagagatgcaaaagcctctggcccgctatattgatgacgaagatctggataggatgctaagagaacaggaaagagagggggaccctatggccaacttcatcaagaagaataaggccaaggagaacaagaataaaaaagtgagacctcgctacagtggtccagcacctcctcccaacagatttaatatctggcctggatatcgctgggacggagtggacagatccaatggatttgaacagaagcgctttgccaggcttgccagcaagaaggcagtggaggaacttgcctacaaatggagtgttgaggatatgtaactttcctgaggctgtgggggtggctgggctgtggtagtgggcataggcagcgagatatccagtggtaacagttgtctgtgctaataattggagcccacacagaccagcaacttgttgaatgccagttttgaccacagaagaatattcgagacctgatgtttggactgaggtacctgtacttcttgggtgtgacagcaccggctgttgctggctttcagaggaagcattgatttctcattgaccagggtttgttcttggtagggtttttctttttcttttttaaataaacatgtatttatttttttaaaaaaaaaaaaa

SEQ ID NO: 468 - DNA, 2386 bp, Homo sapiens
  CDS (876)..(1598)
cgcacggaaagtttggaggcttagcaaggagggtggtgccggcctccgcccggtggtggcagaactgcctgtgcgagcacggcttccacgtgggctgcgccgccgggcgtcatgtcgggcctaagagacacgctctacagctgtgaaatctgaagttcaggtttgcatttccttactgctttgtcttgaagacagaacgatgccaaagaaagcaaagcctacagggagtgggaaggaagaggggccggctccctgtaagcagatgaagttagaagcagctggggggccttcagctttaaactttgacagtcccagtagtctctttgaaagtttaatctcgcccatcaagacagagacttttttcaaggaattctgggagcagaagccccttctcattcagagagatgaccctgcactggccacatactatgggtccctgttcaagctaacagatctgaagagtctgtgcagccgggggatgtactatggaagagatgtgaatgtctgccggtgtgtcaatgggaagaagaaggttcttaccataaacgatggcaaagcacactttcttcagctgagaaaaagatttgatcagaaaagggcaacgattcagttttcaccaacctcagagatttaaggatgagctttggaggatccaggagaagctggaatgttactttggctccttggttggctcgaatgtgtacataactcccgcaggatctcagggcctgccgccccattatgatgatgtcgaggttttcatcctgcagctggagggagagaaacactggcgcctctaccaccccactgtgcccctggcacgagagtacagcgtggaggccgaggaaaggatcggcaggccggtgcatgagtttatgctgaagccgggtgatttgttgtactttcccagaggaaccattcatcaagcggacactcctgcggggctggcccactcgactcacgtgaccatcagcacctaccagaacaattcatggggagatttccttttggataccatctcggggcttgtatttgatactgcaaaggaagacgtggagttacggaccggcataccccggcagctgctcctgcaggtggaatccacaactgttgctacaagacgattaagtggcttcctgaggacacttgcagaccggctggagggcaccaaagaactgctttcctcagacatgaagaaggattttattatgcacagactccccccttactctgcgggagatggggcagagctgtcaacaccaggtggaaagttaccgaggctggacagtgtagtgagactgcagtttaaagaccacattgtcctcacagtactgccggatcaagatcaatctgatgaagctcaagaaaagatggtgtacatctatcattccttaaagaatagtagagagacacacatgatgggaaatgaggaggaaacagagtttcatggacttcgcttccctttgtcacatttggatgcactgaagcaaatttggaatagtccagctatttctgtcaaggacctgaaacttactacagatgaggaaaaggaaagcctggtattatccctctggacagaatgtttaattcaagtagtctagtgcctttgcagaatcaaatgcctactattttatatgcatatattaaaagaaaagcaaagacctgagccgaggagaggatgaattcaagtttccttacctgcgtatctactaacaaacatgagacctccctgttacaggtggtcagttggccaaatgtactaacgggcacatgaaagaaagaacagcaaattaccaagtgtctcagaaaatgacaaaaccatattttgacaagtttatttaatccagtgtggtagaaaaggcacaattccaatgtatcatttagaattgaatgtcattaacctggctttgttctttggaagaaacaacttctttaaagagcttctttggctctagaaaaatttcaaacaattaaaataagaaaaaattttaaactggttttttataatgaaaatatacatacctttgtgtatagacaagcccatgcccattaaaataaagttatcctgtaacataaattttattaaataatacttccccacagatgagaggcacgcaacacctatggacaaaagggagttacagaggctgcttaaaagatggagaaaagcctgagattgaaggaggaaaaaaacccagtatttaaagtctataaaaaatactcaaaatagtgggtcttcgagtttaaaatagtcattgttattttacattctaaagtgcatgtaggttgatattttttaaaatatcattggagaatttaatctttctttataaaaatagagcatttttctgctttctggcaaaagttggggataaaaggaaaaaaa

SEQ ID NO: 469 - DNA, 1287 bp, Homo sapiens
  CDS (71)..(655)
tttcgtaggcggcgtccgcgacgcagctgttcacgcttaggtgggcgacgtgggcgcaggtgggcgcaggatggcaaaacagaagagaaaagttcctgaagtgacagagaaaaagaacaaaaagctgaagaaggcgtcagcagaggggccactgctgggccctgaggctgcaccaagtggcgaaggagccggctccaagggcgaagctgtgctcaggcccgggctggacgcagagccagagctgtccccagaggagcagagggtcctggaaaggaagctgaaaaaggaacggaagaaagaggagaggcagcgtctgcgggaggcaggccttgtggcccagcacccgcctgccaggcgctcgggggccgaactggccctggactacctctgcagatgggcccaaaagcacaagaactggaggtttcagaagacgaggcagacgtggctcctgctgcacatgtatgacagtgacaaggttcccgatgagcacttctccaccctgctggcctacctggaggggctgcagggccgggcccgagagttgacggtgcagaagggcggaagccctgatgcggggagcttggatgaggagggctctgatccccccctgccggggagggcccagcgcatccgacaggtgctgcagctgctctcctagtgggttcagcgcggggcggggccgctgcccagtgcagggctgcctcagaccacacagggtgcagctcctccggcggtgggggccgggttcaccagcagggcagcggctgagcaagggctttcagctcctccggtggtgggggccgggatcaccagcaccagagcctcgcaagggccccttccctcctccagaccctccttggccggtgacggctgtgacagtgatggcaggttcagtgccttcagcgcagagcgtggatgctctggaatcacccggacccctggccttggagggaccctccagccccaggaatctgctttggagggaaatgtctatttttctaccgggaatattttagagattggggcatgctggctcctcccgccagctgcaaacctgcaccttccgcctgattcccgatccccctgcgtgggccgcattcctggtcccctgcctgcgtccatcgaggggcctggctgtggcctgttttcctttgaccccacacagcgtcattgcgggtcatggggagcccctggtgggagcttgtggagtcggatcacgtacctgtgcagaaaccgcctctgtggctgcatttgaaataaaacccgacccagcagcaaaaaaaaaaa

SEQ ID NO: 470 - DNA, 3218 bp, Homo sapiens
  CDS (448)..(2208)
cggcgccgcctcccagcccagagcccagcgctcaggaaggtgcgggcgggggagaaagcaacaccattgtttttcaggcgcctccatttgcccccgatgccgagccgtggctttccggatgatcgggagacgcggtctggacgggccgggaaaggagccgggcgcctgcggagaccccgcctcagcgagtacgcccggccgggcgggctgggaggatgaggacggctgccctggacttccgccgccacaggagggttttcggccggacgccgggagggagctccaggctgtgagctccatttgtaaaggtcttaataacaagaacagtgacttcggctccggagcttcaagatagtggcctgcttggcctgcccatctcggatctctccaggaggacccagccacccaagggtcgtcttctgctgctgacccccatcaaatcccatcatgcccacagccctgtgcccccgagtcttggctccgaaggaaagtgaggagcccaggaaaatgaggagcccacctggagagaaccctagcccccagggggagcttcccagccccgagtcctctcggcgtctcttccgccgtttccgctaccaggaggcggcgggcccccgggaggccctgcagggcctctgggacctgtgcggtggctggctgcggcctgagaggcacaccaaggagcagattctggagctgctggtgctggagcagttcctggccatcctgccccgggagatccagagctgggtgcgggcgcaggagcctgagagcggagagcaggctgtggccgcggtggaggcactggaacgggagcccgggagaccctggcagtggctcaagcactgtgaagaccctgtggtgattgatgatggggacagccctctggaccaggagcaggagcagctgccggtagagccccacagcgaccttgcaaagaaccaggatgcccagcccataaccctggcacagtgcctggggctcccaagcagaccaccaagccagctcagcggggacccagttctgcaagatgctttccttcttcaggaagagaatgtgcgggacacacagcaggtgaccaccctccagctacccccgagtcgggtttctccattcaaggacatgattttatgcttctctgaagaggattggtcccttctagatcctgcccagactggcttctatggagagttcatcattggggaggattacggggtctcaatgcctccaaacgacctagctgcccagccagatctctcccagggagaggagaatgagccacgcgttccagagttgcaggatctccagggcaaagaagtgccccaggtctcctacttggactctccaagtctccagccattccaggtagaagaaagaaggaaacgtgaggagctgcaggtgccagagttccaggcctgcccacagacggtggtgcctcaaaacacctacccagctggcggcaacccgcgatctctagagaacagcctggatgaagaagtgaccatcgagatcgttctctccagctctggggacgaggactcccagcatggcccgtactgcacagaagagctggggagccccacagagaagcagcgcagcctccccgcctcccaccggagcagcaccgaggccggaggcgaggtgcagacctccaagaagtcctacgtgtgtccgaactgtggtgaaatcttccgctggagggtcaacttcatccggcatctgcggagccgcagggagcaggagaagccgcacgagtgctcggtgtgcggggagctgttcagcgacagcgaggacctggatgggcacctagagagccacgaggcccagaagccttaccggtgtggtgcctgcgggaagagcttccgcctgaactcccacctgctctcccaccggcggatacacctgcagccggacagactccagccggtggagaagagagagcaggcggcatccgaggacgcggacaagggtcccaaagagccgctggaaaacggcaaggccaaactgagcttccagtgctgtgagtgtgggaaggccttccagcggcacgaccacctggctcggcaccgcagccactttcacctgaaggacaaagcccggcccttccagtgccggtactgcgtcaagagcttcacgcagaactatgacctcctccgccacgagcgcctgcacatgaagcgccgttccaagcaggctctgaactcctactgagcctctccgcctggggcggcctcaccctggctggtgctgccccctcaccttggtactgatcagcgcccccacccaggacataccttccccaggatagagagcacacctccctcctgtccttgctctcaggtagtgagcgttcgggtggtgccatgggagcactctccctcccccaggtaatgaaagagtggccaagtgagtgttctgtttctgctgtgccaaaaaacgggggggatgtgccatcaccaggttggacatgccaggtgttctgcgtcttagagacccttggcccatgctccccaagctcggggagtaaaactgggctatcccccgtcagggcggcaccctggtcaccagccaaacctcagtatactccctcccctccttccctgtctgaacgctaggatctgctcctgaagctccaggatgcctgcacttccactgagaagctgctggcggatgttggactagaggaaagaagaaggcagggtgggactgatgggctcagtggggagcagggccaggcacactgagccagacatgtcatgtctgagccccagattcgtggccatcaggtaggcaggagcaccccgcagatccaagatgatcaggcagcccttttgggctggcctctgtggcaggggtctgcagagctccttcttgaggtttggaaacagtcgtcatacctgttgattttcctgggggccaatcactagggatctggagctcaccaaaaacaaagcttacattttaatttgtgttgcacacctaccccataatgtctttataccccaaagatccttggtaaatgcttgtgggttggaagcggagttgtcatcgtttaaaaggcacttaagtcccttcttccaatctgtcctgtctaggaatgtggagctctgcccccagtgaggggttctcctgtctgggtgagccaagctccagaacagaaccttgcctgacaacacacttgatagatacattagcttggagtgctggtgtgtccaaac

SEQ ID NO: 471 - DNA, 1129 bp, Homo sapiens
  CDS (209)..(1123)
ctgaaatcactacatagtaaaaaccttcagaagcccagaaaaaccaaggaatactggaattagaaagactatttttgagagccatgtgacagaccaagcagcccaccccacaaggatcccttcagcaagcaaagaacaaaggaaaaaagctctcacttgacatgttctcaaaacaatttgcctgctaaatgttaaagctatcaccctcatgttgtgtggaattgatatccatgccttcaccatttgtaaatatccatgtggaaaaagtagggagtgtgttgccccaaacatctgcaaatgtaaacctggttacattggttctaactgccaaactgctctttgtgaccctgattgcaaaaaccatggaaaatgtattaagcctaacatttgtcagtgtcttccaggacatggtggagcaacctgtgatgaagaacattgtaacccaccttgtcaacatggtggcacatgcttggctgggaatctctgcacttgtccttatggttttgtaggaccaaggtgtgaaacaatggtttgtaacaggcactgtgaaaatggaggccagtgtcttacaccagatatttgccagtgcaaacctggctggtatggacccacctgtagtacagctttgtgcgaccctgtctgcctcaatggtggttcgtgtaataagccaaatacttgcctctgtccaaatggattctttggggaacactgtcagaatgctttctgtcaccctccctgtaagaatggtggccactgcatgagaaataatgtgtgcgtctgtcgtgaaggatacactggtaggagattccaaaaaagcatctgtgatcctacgtgcatgaatggaggaaaatgtgtgggaccaagcacttgctcttgtccttctggttggagtgggaaacgatgcaacacacctatctgcttgcagaaatgtaaaaacggtggtgaatgcattgcgcccagcatatgccattgtccttcctcctgggaaggagtgcggtgtcaaataccaatttgcaacccaaaatgtctttatggaggcagatgcatatttcccaatgtgtgttcctgccgcactgaatactctggagtcaaatgtgagaagaaaatacagataagacgccattgagag

SEQ ID NO: 472 - DNA, 894 bp, Homo sapiens
  CDS (292)..(681)
tttgggtttggacgggtgcgtttgtttttcatagtgcaggtctggagccggactgagatggggagtagagggaccccttgaaacttcagggtggatgaatatgaagtttcatcaccagctgtgatgtttgatattggactgtggttgtgccagttgacactcaggagtggagactagatctgcaatctgttgggactgtgatgaggggatcatcctgccctcgaaccagacccagccctgtagcccaggcactattgcctggagttcctgggctctcagcgccaggaaatcatgaggttcagtgtctcaggcatgaggaccgactaccccaggagtgtgctggctcctgcttatgtgtcagtctgtctcctcctcttgtgtccaagggaagtcatcgctcccgctggctcagaaccatggctgtgccagccggcacccaggtgtggagacaagatctacaaccccttggagcagtgctgttacaatgacgccatcgtgtccctgagcgagacccgccaatgtggtcccccctgcaccttctggccctgctttgagctctgctgtcttgattcctttggcctcacaaacgattttgttgtgaagctgaaggttcagggtgtgaattcccagtgccactcatctcccatctccagtaaatgtgaaagcagaagacgttttccctgagaagacatagaaagaaaatcaactttcactaaggcatctcagaaacataggctagggtaatatgtgtaccagtagagaagcctgaggaatttacaaaatgatgcagctccaagccattgtatggcccatgtgggagactgatgggacatggagaatgacagtagattatcaggaaataaataaagtggtttttccaatgtaaaaaaaaaa

SEQ ID NO: 473 - DNA, 2257 bp, Homo sapiens
  CDS (127)..(1821)
atctcgctgcctgacgagaagctggaccagctgacgctggcgctcttcgaatcggccgacgcggacggcaacggggccatcaccttcgaggagctccgggacgagctgcagcgcttccccggagtcatggagaacctgaccatcagcgctgcccactggctgacggcccccgccccccgcccacgcccgcgccggccgcgccagctgacccgcgcctactggcacaaccaccgcagccagctgttctgcctggccacctatgcaggcctccacgtgctgctcttcgggctggcggccagcgcgcaccgggacctcggcgccagcgtcatggtggccaagggctgtggccagtgcctcaacttcgactgcagcttcatcgcggtgctgatgctcagacgctgcctcacctggctgcgggccacgtggctggctcaagtcctaccactggaccagaacatccagttccaccagcttatgggctacgtggtagtggggctgtccctcgtgcacactgtggctcacactgtgaactttgtactccaggctcaggcggaggccagccctttccagttctgggagctgctgctcaccacgaggcctggcattggctgggtacacggttcggcctccccgacaggtgtcgctctgctgctgctgctcctcttcatgttcatctgctccagttcctgcatccgcaggagtggccactttgaggtgttctattggactcacctgtcctacctcctcgtgtggcttctgctcatctttcatgggcccaacttctggaagtggctgctggtgcctggaatcttgtttttcctggagaaggccatcggactggcagtgtcccgcatggcagccgtgtgcatcatggaagtcaacctcctcccctccaaggtcactcatctcctcatcaagcggccccctttttttcactatagacctggtgactacttgtatctgaacatccccaccattgctcgctatgagtggcaccccttcaccatcagcagtgctcctgagcagaaagacactatctggctgcacattcggtcccaaggccagtggacaaacaggctgtatgagtccttcaaggcatcagacccactgggccgtggttctaagaggctgtcgaggagtgtgacaatgagaaagagtcaaaggtcgtccaagggctctgagatacttttggagaaacacaaattctgtaacatcaagtgctacatcgatgggccttatgggacccccacccgcaggatctttgcctctgagcatgccgtgctcatcggggcaggcatcggcatcaccccctttgcttccattctgcagagtatcatgtacaggcaccagaaaagaaagcatacttgccccagctgccagcactcctggatcgaaggtgtccaagacaacatgaagctccataaggtggactttatctggatcaacagagaccagcggtctttcgagtggtttgtgagcctgctgactaaactggagatggaccaggccgaggaggctcaatacggccgcttcctggagctgcatatgtacatgacatctgcactgggcaagaatgacatgaaggccattggcctgcagatggcccttgacctcctggccaacaaggagaagaaagactccatcacggggctgcagacgcgcacccagcctgggcggcctgactggagcaaggtgttccagaaagtggctgctgagaagaagggcaaggtgcaggtcttcttctgtggctccccagctctggccaaggtgctgaagggccattgtgagaagttcggcttcagatttttccaagagaatttctagcctcacctctccaagctctgccccaagtccacaccatgggtctgcttcatcgcattagtataaatgcccccacagggaccagcctcagatgacccacccaataagacaaagcctagggaccccctaatcctgctcaacagagagaacaggagaccccaaggggcagatgaacttcctctagaacccaggggaagggacagtgccttgttcagtctgctgtagattctggggtttctgtgaaagtgagggaaccagaggctggtcacgggagcttgggggtggggttcgagggggcagagggcaaccactcctccaaacattttccgacggagccttcccccacatccatggtcccaaacctgcccaatcatcacagtcatttggaagcttatttctccggcatcttataaaattgttcaaacctaaaaaaaaa

SEQ ID NO: 474 - DNA, 5246 bp, Homo sapiens
  CDS (120)..(5243)
acgaagcccacaaaaaatactactgctcagagcttcagatcgcaaagcccatctctgcaggcacccacacatctccagaagctgaaaagagtcagattgagcatgagccgtggtcccaaatgatgcattacaaactgggaaccaccctggaactcactccactgaggaagaggaggaaagagaagagccttggggacgaggaagagccacctgcctttgagtccacaaaaagtcagtttggcagccccgggccatctgatgctgctcggaaccttcccctggagtccaccaagtcaccagcagaaccaagtaaatcagtgccctccttggagggacccacgggcttccagccaaggactcccaagccagggtccggttcagaatcagggaaggagaggagaacaacgtccaaagaaatttctgtcatccagcacaccagctcctttgagaaatctgattctctcgagcagccgagtggcttggaaggggaagacaaacctctggcccagttcccatcacccccacctgccccacacggacgctctgctcactccctgcagcctaagttggtccgccagcccaacattcaggttcctgagatcctagtaactgaggagcctgaccggccggacacagagccagagccgccccctaaggaacctgagaagactgaggagttccaatggccccagcgcagccagacacttgcccagctcccagctgagaagctgccacccaaaaagaagaggttgcgcctggcagagatggcccaatcatcaggggagtccagcttcgagtcctctgtgcctctgcctcgcagcccgagccaggaaagcaatgtctctttgagtgggtccagccgctcagcctcgtttgagagggatgaccatgggaaagccgaggcccccagtccctcatctgacatgcgccccaaacccctgggcacccacatgttgactgtccccagccaccacccacatgcccgagagatgcggaggtcagcctcagagcagagccccaacgtttcccattctgcccacatgaccgagacacgcagcaaatcctttgactatggcagcttgtccttgacaggcccttctgctccagccccagtggctccaccagcgcgggtggccccgccagagagaagaaaatgcttcttggtgagacaggcctctctgagcaggcctccagaatctgagttggaggttgcccccaagggaagacaggagagcgaagaaccacagccctcatccagtaaaccctctgccaaaagctcattgtcccagatttcctctgcggccacctcacatggtggacccccgggaggcaagggcccagggcaggacaggcccccattggggcccactgtgccctacacagaagcactgcaagtgttccaccaccccgttgcccagacacccctgcatgagaagccatacctgcccccaccagtctcccttttctccttccagcatctcgtgcagcatgagccaggacagtctccagaattcttctccacccaggccatgtccagcctcctgtcctcaccatactccatgcccccacttcctccctccttatttcaagccccaccgcttcctctccagcctactgttctgcacccaggccaactccatctcccccagctcatgcctcacccagccaacatccccttcaggcaacccccttccttcctccccatgccatacccgacctcctcagcactgtcttctgggtttttcctgcctctgcaatcccagtttgcacttcagctccctggtgatgtggaaagccatctgccccagatcaaaaccagcctggccccactggcaacaggaagtgctggcctctcccccagcacagagtacagcagtgacatccggctaccccctgtggctcccccagccagctcctcagcacctacatcagctcctccactggccctgcctgcctgtccagacaccatggtgtccctggttgtgcctgtccgtgttcagaccaatatgccgtcctatgggagcgcaatgtacaccaccctttcccagatcttggtcacccagtcccaaggcagctcagcaactgtggcacttcccaagtttgaggaacccccatcaaaggggacgactgtatgtggtgcagatgtgcatgaggttgggcccggcccttctgggttaagtgaagagcaaagcagagctttcccaactccatacctgagagtgcctgtgacattacctgaaagaaaaggcacttccctgtcatcagagagtatcttgagcctggaggggagttcatcaacagcagggggaagcaaacgtgtcctttcaccagctggcagccttgaacttaccatggaaacccagcagcaaaaaagagtgaaggaggaggaggcttccaaggcagatgaaaaacttgagctggtaaaaccatgcagtgtggtccttaccagcaccgaggatgggaagaggccagagaaatcccacttaggcaaccagggccaaggcaggagggagctagaaatgctgtccagcctgtcctcagatccatctgacacaaaggaaattcctcccctccctcaccctgcattgtcccatgggacagccccaggctcagaagctttgaaggaatatccccagccatctggcaaacctcaccgaagagggttgaccccactgagcgtgaagaaagaagattccaaggaacaacctgatctcccctccttggcacctccgagctctctgcctctgtcagaaacgtcctccagaccagccaagtcacaagaaggtacggactcaaagaaggtactgcagttccccagcctccacacaaccactaatgtcagttggtgctatttaaactacattaagccaaatcacatccagcatgcagataggaggtcctctgtttacgctggttggtgcataagtttgtacaaccccaaccttccgggggtttccactaaagctgctttgtccctcctgaggtctaagcagaaagtgagcaaagagacatacaccatggccacagctccgcatcctgaggcaggaaggcttgtgccatccagctcccgcaagccccgcatgacagaggttcacctcccttcactggtttccccggaaggccagaaagatctagctagagtggagaaggaagaagagaggagaggggagccggaggaggatgctcctgcctcccagagaggggagccggcgaggatcaaaatcttcgaaggagggtacaaatcaaacgaagagtatgtatatgtgcgaggccgcggccgagggaaatatgtttgtgaggagtgtggaattcgctgcaagaagcccagcatgctgaagaaacacatccgcacccacactgacgtccggccctatgtgtgcaagcactgtcactttgcttttaaaaccaaagggaatctgactaagcacatgaagtcgaaggcccacagcaaaaagtgccaagagacaggggtgctggaggagctggaagccgaagaaggaaccagtgacgacctgttccaggactcggaaggacgagagggttcagaggctgtggaggagcaccagttttcggacctggaggactcggactcagactcagacctggacgaagacgaggatgaggatgaggaggagagccaggatgagctgtccagaccatcctcagaggcgcccccgcctggcccaccacatgcactgcgggcagactcctcacccatcctgggccctcagcccccagatgcccccgcctctggcacggaggccacacgaggcagctcggtctcggaagctgagcgcctgacagccagcagctgctccatgtccagccagagcatgccgggcctcccctggctgggaccggcccctctgggctctgtggagaaagacacaggctcagccttgagctacaagcctgtgtccccaagaagaccgtggtccccaagcaaagaagcaggcagccgtccaccactagcccgcaaacactcgctaaccaaaaacgactcatctccccagcgatgctccccggcccgagaaccacaggcctcagccccaagcccacctggcctgcacgtggacccaggaaggggcatgggccctctcccttgtgggtctccaagacttcagctgtctcctctcaccctctgccccctgggaagagaactggcccctcgagcacatgtgctctccaaactcgagggtaccaccgacccaggcctccccagatactcgcccaccaggagatggtctccaggtcaggccgagtcaccaccacggtcagcgccgccagggaagtgggccttggctgggccgggcagcccctcagcgggggagcatggcccaggcttggggctggccccacgggttctcttcccgcccgcgcctctacctcacaagctcctcagcagaagcccagagacctgcgcctccccgtggaaggccgagtcccgaagtccctcctgctcacccggccctgctcatcctctctcctcccgacccttctccgccctccatgacttccacggccacatcctggccctgacagaggagaacatcttcagccacctgcctctgcactcccagcacttgacccgtgccccatgtcccttgattcccatcggtgggatccagatggtgcaggcccggccaggagcccaccccaccctgctgccagggcccaccgcagcctgggtcagtggcttctccgggggtggcagcgacctgacaggggcccgggaggcccaggagcgaggccgctggagtcccactgagagctcgtcagcctccgtgtcgcctgtggctaaggtctccaaattcacactctcctcagagctggagggcggggactaccccaaggagagggagaggaccggcggaggcccgggcaggcctcctgactggacaccccatgggaccggggcacctgcagagcccacacccacgcacagcccctgcaccccacccgacaccttgccccggccgccccagggacgccgggcagcgcagtcctggagcccccgcttggagtccccgcgtgcaccggccaaccccgagccttctgccaccccgccgctggaccgcagcagctctgtgggctgcctggcagaggcctctgcccgcttcccagcccggacgaggaacctctccggggaacccaggaccaggcaggactcccccaagccctcaggaagtggggagcccagggcacatccacatcagcctgaggacagggttccccccaacgcttag

SEQ ID NO: 475 - DNA, 4964 bp, Homo sapiens
  CDS (282)..(1751)
atggcagagggtgagcgtatagggagtggtgagtacgtggccattgttgaagttgactaccctgggttaagtgttacaagtaccagtggtggtcagagctgctcgtctgaggctgctgaggcgacggccggtgtcgtggtcgcggtacctgttccaacacggctcgcgggcccgtgccggctccgggtccccggcgcggctgtccgagcccctgcggcgggcggacgatggtgtggcggagcacgcggacgcgggcggcgcggcggcgggcatgaaggaggatggaagggcaggacgaggtgtcggcgcgggagcagcacttccacagccaagtgcgggagtccacgatatgtttccttctttttgccattctctacgttgtttcctacttcatcatcacaagatacaagagaaaatcagatgaacaagaagatgaagatgccatcgtcaacaggatttcgttgtttttgagcacgttcactctcgcagtgtcagctggggctgttttgcttttacccttctcaatcatcagcaatgaaatcctgctttcttttcctcagaactactatattcagtggctaaatggctccctgattcatggtttgtggaatcttgcttcccttttttccaacctttgtttatttgtattgatgccctttgcctttttctttctggaatcagaaggctttgctggcctgaaaaagggaatccgagcccgcattttagagactttggtcatgcttcttcttcttgcgttactcattcttgggatagtgtgggtagcttcagcactcattgacaacgatgccgcaagcatggaatctttatatgatctctgggagttctatctaccctatttatattcctgtatatcattgatgggatgtttgttacttctcttgtgtacaccagttggcctttctcgtatgttcacagtgatgggtcagttgctagtgaagccaacaattcttgaagacctggatgaacaaatttatatcattaccttagaggaagaagcactccagagacgactaaatgggctgtcttcatcggtggaatacaacataatggagttggaacaagaacttgaaaatgtaaagactcttaagacaaaattagagaggcgaaaaaaggcttcagcatgggaaagaaatttggtgtatcccgctgttatggttctccttcttattgagacatccatctcggtcctcttggtggcttgtaatattctttgcctattggttgatgaaacagcaatgccaaaaggaacaagggggcctggaataggaaatgcctctctttctacgtttggttttgtgggagctgcgcttgaaatcattttgattttctatcttatggtgtcctctgttgtcggcttctatagccttcgattttttggaaactttactcccaagaaagatgacacaactatgacaaagatcattggaaattgtgtgtccatcttggttttgagctctgctctgcctgtgatgtcgagaacactgggaatcactagatttgatctacttggcgactttggaaggtttaattggctgggaaatttctatattgtattatcctacaatttgctttttgctattgtgacaacattgtgtctggtccgaaaattcacctctgcagttcgagaagaacttttcaaggccctagggcttcataaacttcacttaccaaatacttcaagggattcagaaacagccaagccttctgtaaatgggcatcagaaagcactgtgagacgcacagacggcgtcttctgccaccaagagacccgagaactccagattcacgacattcctgtcccatgtagaagcatttccattcaaccgtggcccctcttcagaacctagacctatcagtgccatttttttttcataatctacgaagaacttggctatggctgatcttttttaaatttaactttctgatggaccctgtagtttccagttaagtgcagattccttacagacatatagaacagcgcattcttctgtagacatttgctcatgttggtaaatacaatcacccatatgaaaaaattgttttcacctgatatgaaaatgttagaaaaggcaaactccgggacttctaaagatttacttaaatcccattatgtactttattcagaatgtagaagctgacttgaaaggcatccttggtactaagtgaagcttattcagaaaatgcatttttcaaatgcaatggcaactgcttgtagatatcatttttgcagtgtatgttggagctgtaatggttgcaattatgtttcttatttccttaaaagcaaaaagcgtagtttctgatttatgttatagaatgatactgattagactttgagccaaggggaaaatactaaattcttttaaacctggagccttagagagccacaggaatatcttctgttgtacagtctaataagctgtggtaggaagtatcatgtaatcacagtttaatgacagtttatgtatatatataattcagtattccctctgataacatagttgccagtgtttaatacacttgtaacttggatttttaccttataggctatatgtatactcagttttttaaagcatttttttcagagatcacttaattccccatgcttctgcaatgcatataaaaactataaatgccgagtggtagaaactcctctttcttcatagtcctcaggctttggttacatttgcatatgccatttgaagcctccagcttttaccagtttaacatccaaagttcacagcatcagcattcatggtgtaagaacagttttgcagtataacacgatctgataatcattcagttattaaattgtaaataattattgggatggtttcttggctttaagtccactgaataaaaactatgaaattgcactctgtgtcaaccatccactaggatagaataccgaaatctgtgcatgcaaaaataggagatgggcccatttgcacacaattcgtagttatgcagtctgctatataaatatgttcacatgcactgtgtgtatgaaaatagatggtctgtgttcagacaaaagtaaaacatttttttcaaattgttacatttaaaggttttctgggagaaatttatgaaacgcaggctgtgtctatttgacatcagaaatttccactttaaaccaaaataataagaaactttaatctgtatatttacaacctttgttgagtacacttcccccttatttatacgtctgcatttccttccgagcttcacatctttctaaaatgcagcttggttttaaaataaaagaacattcattttgtgattctaaacaagcttcagtaaataccaccagtatagtactggtgaatttctcagcataaaatcgacatacctaaaaagttaataaaattcagctcttttccaatttcattgttatgcctattgaagtattaattgccaggtttgatttttagtgaagcttggagtccatactttgagcagaccaagtgaagggaagaacagaaagaaactcaggagtagagtaatatcacttctcacttacaccactttcaggcacatccaaagagttcctagatacttggaaaatgtctgaaaatttttaagtaaaatactaaacttttcagtgtttagctcaactttttgttcatttggaagtttctctccatccgaggacttaagccagttttggatttgtaagccctgagtacaatacacttcctggaggcatcctcactgctgttgaagcaaaggatatgcatggggtggaaggacggcttcgaacctgggactcatatgccttgagaacaaatagattgttacagccttgggctgctgcgtaatcacggttcctcgaggctcttcctgagcacatgcccaagcatctgcctctggagagactgactccaaatgcaggtgcttccattggagctaggtcggaggctgctttatatgacgaactccagaaatggatgccagaatacggaggccaaacgttctgagtcctggtaaggacagtcgctctgggggtcctcattttactgcagttcctgcacgccagtgaaagagaggagatagaccctggaaggcagagctgcagatgctcatcatcaggtcaattctggagctacagttttgtttctgactggatagggatgcaccagtgactgtcacatcaagcagtccttttattctctctcctttagtatcgattttaaagggcattaggcactatggttccagagtttcttggggaaaacttgcagattcttattaattggttctgcaatacttaaataaattattttacaattataagttttcagattataacatttgtattaatttttactgattttccaagatacttcttagatttactatttacgtagctttatgtacattctctgtaaaaatagacctctaaatatgaggctttacatgaaatttgtacacacatacacactaatgttagctccttaaattgctgcactaaggtgctggttagtagagatggacggagcctctcgcgttttgctctcagatgtgttaaaggcgcacgtgtacctgctctcagcggcagtgcggcctccccatctgctgggtgcccatggccctccctgcagcctcagtgatgacctcgtctgccagggacacaggttttcatcatttacaggctcttatgtgctagttttgttggtagcacgttatttaatgcataaaggcagaattcttacaagttttttttttttaatgtgaacatagatgcagcaccgactttttaaacttgaaaaaactggtataatgttaacttttaaaaataacatttggacacactagtaattgatttttgtttacagattgttttgtttacaaattgttagtctttgtttctatgagatacttttagtgtgactttttaaatgtcttagaaattaaaagttgtacaaaaagtgaaaaaaaaaaaaa

SEQ ID NO: 476 - DNA, 1776 bp, Homo sapiens
  CDS (20)..(1495)
tagagatttattgacagatatgactcttttacattatacctgcaaatctggagctcatggtattggtgatgtggaaacagctgtaaaatttgcaactcagcttattgacctgggagcagacattagtttgcggagtcgctggacaaacatgaatgctttgcattatgctgcttattttgatgtccctgaacttataagagtgattttgaaaacatcgaaaccaaaagatgtggatgccacttgcagtgattttaattttggaacagctttgcatattgcagcatacaacttgtgtgcaggtgctgtgaagtgcctcttggagcagggagcaaatcctgcatttaggaatgacaaaggacagatccctgctgatgttgttccagacccagtagatatgccgttagagatggctgacgccgcagccactgctaaggaaatcaagcagatgcttctagatgcggtgcctctgtcatgtaacatctcaaaggccatgctcccaaattatgatcatgtcactggcaaggcaatgcttacgtcacttggcctgaagttgggggatcgtgttgttattgcaggacagaaggttggtacattaagattttgtggaacaactgaatttgcaagtgggcagtgggctggcattgaactggatgaaccagaaggaaaaaataatggaagtgttggaaaagtccagtactttaaatgtgcccccaagtatggtatttttgcacctctttcaaagataagtaaagcaaaaggtcgaaggaagaatataacacacactccttctacaaaagctgctgtacctctcatcaggtcccagaaaattgacgtagctcatgtgacgtcaaaagtaaatactggattaatgacatcaaaaaaagatagtgcttctgagtcaacactttcattgcctcctggtgaagaacttaaaactgtgacagagaaagatgttgccctgcttggatctgtcagcagctgctcctctacatcttctttggaacacagacagagctaccccaagaaacagaatgcaatcagcagtaacaagaagacaatgagcaaaagcccttccctttcatccagagccagtgctggtttgaattcctcagcaacatctacagcaaataatagccgttgcgagggggaactccgcctcggagagagagtgttagtggtaggacagagactgggcaccattaggttctttgggacaacaaacttcgctccaggatattggtatggtatagagcttgaaaaaccccatggcaagaatgatggttcagttggaggtgtgcagtattttagctgttctccaagatatggaatatttgctcccccatccagggtgcaaagagtaacagattccctggataccctttcagaaatttcttcaaataaacagaaccattcttatcctggttttaggagaagttttagcacaacttctgcttcttcccaaaaggagattaacagaagaaatgctttttccaagtgagtattaagaagatttagaaaaacacctttcaagatgaacatgatgggattctgtgaagaaagaaaagtggagtgctgtatcttttgcattgcttggtagagttttaacacgtaggagaaaaggtgtgataagtgtattgagaagcgttcttcctccctcctttgcaagcgcaattaaaaatgtcaccagtgactaaaactagtgcactgcatatattttatcttcatagaggtcagaactgttaataaaagttaaaggaatttacaaaaaaaaaaaaa

SEQ ID NO: 477 - DNA, 2565 bp, Homo sapiens
  CDS (169)..(1140)
gcctacagacactgacattttccccatcacctcactccctcacctgtacctcccaacgccaacatcctcccctctgctctcctcacattggaaattccaactccctcccacgtctccaccaggtgtcacaatcgcgctctcgccggctcctctccccgcccctccgggatggtagtgcggaagcggaagaggctgcagggccgggaagcctctgtttggtccggccaggtcccgggatccgggccgcccgctgcgatgccaagtccccggaggggcatggagggacggccgctgggcgtctccgcttcgagcagcagcagcagccccggcagcccagcccatggcggcggtggcggcggcagcaggtttgagttccagtccctgctcagcagccgcgccacggccgtggaccccacctgcgcccggctccgtgcatcggagagcccagttcaccgccgcggctccttccccctggccgcggcgggcccctcgcagtcgcccgcgcctccgctgcccgaggaggaccgcatggacttgaacccgtccttcctgggcatcgccctgcgctccctgctggccatcgacctgtggctgtccaagaagctgggggtgtgcgcgggagagagctcgtcgtggggcagcgtgcgaccccttatgaagctgctggagatctcgggacacggcatcccctggctgctgggcaccctctactgcctgtgcaggagcgacagctgggccgggcgcgaggtgctgatgaacctgctcttcgccctgctgttggacctgctgctggtggccttgatcaaagggctggtccgcaggcgccgcccggcccacaaccagatggacatgtttgtcactctctcggtggacaagtactccttcccctcgggccatgccacaagggccgccctgatgtcgaggttcatcctgaaccacctggtgctggccattccactgagggtgctggtggttctgtgggccttcgtcttgggcctatccagggtcatgctggggcggcacaatgtcaccgacgtagcttttggcttttttctgggctacatgcagtacagcatcgtggactattgctggctctcaccccataatgctccggtcctctttttactgtggagtcaacgatgacaccatctcattgattatggcaccaggaagtctgaaggtttccacattcgatgatgtcaacctaaaccagcagccatcccgcttgtccctcttaggcatttcaggcttcctttgggatttcaggtgtcccatgatcttgatgtgctgctaggctggagcacacactggccattactgaacacagccatattagggaaagcaaaaaaacccaaaaaatcctctattgtatatttattcaacaactgtttatgtttccaggacaactgcaaagaaaacaagctgaggtggttatactgttgctgttaaaagttggtatcagtaagatttgtgttttgtgataatccctaaatcaacataccacttgtaaactgaacttcgagaaagaaacatgatgttcattctgtaaatatacatgcagacaggtcatgtactaatcctagtccttttcctgaggtagattttaaacagtatttttaaagtccaagacataggtttttctagtttattccctgaagatctgttgccacagttgggagatttcttcttaatcctgattttcttggtaagcttttttactttattatctctataatttattatctctatccatatttgtggatcgggtagtgggaaaagagattataatacttgtctttctctcctctccctccatccctcaaaagatctttatgcatttcccactactcccttactgtcttttagcattcagagaaaaagccaacttgcttaaagaggaatcacttaaaaggtaggcatatctaagatgctcatagaagaggaagaatgggacatggccccatgcttatttttgtttacaacgtaacatggcatgagagagggcagagaaactaagttgctggggaaagttagaggaactgaaagtttgggaataggctgaccacatattatgccagtgaccagtatgacaggagatggggccctgctgccagtcatctccactgaataaagaataatgctcctctttcagggtaataaagtggggaaaaggaacgtcttctcaatgcaagaacataagctttctcgtatatacctgtatgctacagtttttcacatggaattccgttttctgaaggtacaggcacattttaggtcacagtatttaattggaaattcatcatgggagttgctggtatacaggcacaagatataatctccagaattttggtttaattgagcgttaatttaaagggtgatccctggggggtccccaatattagaggaagaaccaaaggggggggttgtgttaatattggggccaagatgggaagattgtctaaagtgggtactcgaagaaaattaaacatagggggggggggcaaaaagacatggggtaaacaaaaaggttgtctggtgaggagagatatttattgacaatcaatg

SEQ ID NO: 478 - DNA, 1810 bp, Homo sapiens
  CDS (154)..(1371)
cggtcattggggtgctgcagccccgccacctgttccgtagcttgccggtgccccgaaggtgtcttctcctaaggaagattaaatcagaaaattttaaatcacagttatccctttacttaaagccagagtaagccttccaaattaaccccaggaatggcttcaacagaggaacagtacgatcttaagattgtgaaagtggaggaagaccctatctgggaccaagaaacccaccttcgagggaacaacttttctggccaagaagcctcccgacaactttttaggcagttttgttaccaagagactcctggtccccgagaagctctgagccggctccgagaactctgtcatcagtggctaaggccagaaatccacaccaaagagcaaatcttggagctgctggtgctggagcaattcctgactatcctgcctgaggagctccaggcctgggtgcgggagcaccatccggagagtggggaggaggctgtggctgtagttgaagatctggaacaagagcttagtgagccagggaaccaggctccagaccatgaacatggacattctgaagtgctcttggaggatgtggaacatctgaaggtcaagcaggaaccaacagacatacagcttcagcctatggtgacacagctcagatatgaatctttttgcctccaccaatttcaagaacaagatggtgaaagtatacctgagaaccaggagttggcatcaaagcaagaaatcttaaaagaaatggaacatttgggggatagcagactccaaagagatgtatctttggattctaagtacagagaaacttgtaaacgagacagcaaggcagaaaagcagcaggcacattccactggagagagacgccacaggtgcaatgaatgtgggaaaagcttcactaagagttcagtactcattgagcaccagagaatccacactggggagaagccatatgaatgtgaagaatgtgggaaggccttcagccggaggtcaagcctgaatgaacatcggcggagccacactggagagaaaccctatcaatgtaaggagtgtgggaaagccttcagtgccagcaatggcctcactcgacacagaagaatccacacaggggaaaaaccatatgaatgcaaagtgtgtgggaaggctttcctcctcagctcatgccttgttcagcatcagaggatacacactggagagaagcgctatcagtgtcgtgagtgtggcaaagccttcattcagaatgcagggcttttccagcatctccgagtccacactggtgagaaaccctatcagtgcagtcagtgcagtaaactctttagtaagcggacacttcttaagaaacatcagaaaatccacactggagagagaccataagggtgatgagtttgggaaagccttcagtcatcattgcaaccttattaggcattttagaatccatactgttccagcagaactggactaattctgtggaccctcagacccctaaatggggccgtcttggaaagtaagattttcaagtggcttattctgttcttataaaatttatttggtatggcattgaccccctgtttaccaaaccaggtgtggggtttccttgtgtgggatgactgtgattgtagggggttgctgggtggccttcttattccctagcctttggtccatttcttatgatttcctttgaaggcaccaaatcttatctggaaataaattgttatggaggggctgtttttgagcaatactgcatattgaacaattctaaaagaccagtatctatgtatacttttaaaaaaaagatttgctaagatcaaag

SEQ ID NO: 479 - DNA, 1666 bp, Homo sapiens
  CDS (242)..(1663)
gaattcggtcgacgatctctgtaaagactgccgcgtgaactgaggagtcccggaccggtttgcttgctgcaaaggatccagtccagatcccaggagagcctctctgccccttcggacctcgtctcccatatacaaaacgagaagattggcccagttggcgtgtctctacaaaaaggtgcatataccactgccccgctgcaggctgatctgagaaagcctctggcccagggcagataccgccatggccttcctgatgcacctgctggtctgcgtcttcggaatgggctcctgggtgaccatcaatgggctctgggtagagctgcccctgctggtgatggagctgcccgagggctggtacctgccctcctacctcacggtggtcatccagctggccaacatcgggcccctcctggtcaccctgctccatcacttccggcccagctgcctttccgaagtgcccatcatcttcaccctgctgggcgtgggaaccgtcacctgcatcatctttgccttcctctggaatatgacctcctgggtgctggacggccaccacagcatcgccttcttggtcctcaccttcttcctggccctggtggactgcacctcttcagtgaccttcctgccgttcatgagccggctgcccacctactacctcaccaccttctttgtgggtgaaggactcagcggcctcttgcccgccctggtggctcttgcccagggctccggtctcactacctgcgtcaatgtcactgagatatcagacagcgtaccaagccctgtacccacgagggagactgacatcgcacagggagttcccagagctttggtgtccgccctccccggaatggaagcacccttgtcccacctggagagccgctaccttcccgcccacttctcacccctggtcttcttcctcctcctatccatcatgatggcctgctgcctcgtggcgttctttgtcctccagcgtcaacccaggtgctgggaggcttccgtggaagacctcctcaatgaccaggtcaccctccactccatccggccgcgggaagagaatgacttgggccctgcaggcacggtggacagcagccagggccaggggtatctagaggagaaagcagccccctgctgcccggcgcacctggccttcatctataccctggtggccttcgtcaacgcgctcaccaacggcatgctgccctctgtgcagacctactcctgcctgtcctatgggccagttgcctaccacctggctgccaccctcagcattgtggccaaccctcttgcctcgttggtctccatgttcctgcctaacaggtctctgctgttcctgggggtcctctccgtgcttgggacctgctttgggggctacaacatggccatggcggtgatgagcccctgccccctcttgcagggccactggggtggggaagtcctcattgtgagtatccggccggtggcctcgtgggtgcttttcagcggctgcctcagctacgtcaaggtgatgctgggcgtggtcctgcgcgacctcagccgcagcgccctcttgtggtgcggggcggcggtgcagctgggctcgctgctcggagcgctgctcatgttccctctggtcaacgtgctgcggctcttctcgtccgcggacttctgcaatctgcactgtccagcctag

SEQ ID NO: 480 - DNA, 2733 bp, Homo sapiens
  CDS (271)..(2730)
cttcctagcaggagacaaggagcaacgctgcggtggggagcaggctgtggggcccccacccccagccctagccaggcctagtgcctgctgtagcaccctagaagatccccagcagttggcactagctgtacccaccttgcctggggcccccgtgctgggggtcgcccccaagatggtggcggccccagggaggactgtactgccagccccagcctctggccgctaggcaccccctgccttgccctggcccctcactccgaggccagcgccatgctgcgcctggggctgtgcgcggcggcgctgctgtgcgtgtgccggccgggtgccgtgcgtgccgactgctggctcattgagggcgacaagggctacgtgtggctggccatctgcagccagaaccagccgccctacgagaccatcccgcagcacatcaatagcaccgtgcacgacctgcggctcaacgagaacaagctcaaagccgtgctctactcctcgctcaaccgctttgggaacctcaccgacctcaacctcaccaagaacgagatctcctacatcgaggacggtgccttcctgggccagtcgagcctgcaggtcctgcagctgggctacaacaagctcagcaacctgacggagggcatgctgcgaggcatgagccgcctgcagttcctctttgtccagcacaacctcatcgaggtggtgacgcccaccgccttctccgagtgcccgagcctcatcagcatcgacctgtcctccaaccgcctcagccgcctggacggtgccacctttgccagcctcgccagcctgatggtgtgtgagctggccggcaaccccttcaactgtgagtgcgacctcttcggcttcctggcctggctggtggtcttcaacaacgtcaccaagaactacgaccgcctgcagtgtgagtcgccgcgggagtttgccggctacccgctgctggtgccccggccctaccacagcctcaacgccatcaccgtactccaggccaagtgtcggaatggctcgctgcccgcccggcccgtgagccaccccacgccctactccaccgacgcccagagggagccagacgagaactcgggcttcaaccccgacgagatcctttcggtggagccgccggcctcgtccaccacggatgcgtcggcagggccagccatcaagctgcaccacgtcacgttcacctcggccaccctggtggtcatcatcccacacccctacagcaagatgtacatcctcgtgcagtacaacaacagctacttctccgacgtcatgaccctcaagaacaagaaggagatcgtgacgctggacaaactgcgggcgcacactgagtacaccttctgcgtgacctcgctgcgcaacagccgccgcttcaaccacacctgcctgaccttcaccacgcgggaccccgtccccggagacttggcgcccagcacctccaccaccacccactacatcatgaccatcctgggctgcctctttggcatggttatcgtgctgggagccgtgtactactgcctgcgcaagcggcgcatgcaggaggagaagcagaagtctgtcaacgtcaagaagaccatcctggagatgcgctacggggctgatgtggatgccggctccattgtgcacgccgcccagaagctgggcgagcctcccgtgctgcccgtatctcgcatggcctccatcccctccatgatcggggagaagctgcccaccgccaaggggttggaggccgggctggacacacccaaggtagccaccaaaggcaactatatcgaggtgcgcacaggcgccggcggggacggtctggctcggcccgaggatgacctcccggacctcgagaacggccagggctcggctgcagagatctccaccattgccaaggaggtggacaaggtcaaccagatcattaacaactgcatcgatgctctcaagctggactcggcctcttttctgggaggcggcagcagcagtggggaccccgagctggccttcgagtgccagtccctccctgcagctgctgccgcctcctcagccactggccccggggccctggagcggcccagcttcctttcgcctccctacaaggagagctcccaccacccactacagcgccagctgagcgccgacgcggccgtgacccgcaagacctgcagcgtgtcgtccagtggttccatcaagagcgccaaggtctttagcctggacgtgcccgaccatccggccgccacagggctggctaagggcgactccaagtacatcgagaagggcagccccctcaacagcccgctggaccggctcccgctggtgccggcgggcagcggcgggggcagcggcgggggcgggggcatccaccacctggaggtgaagccggcctaccactgcagcgagcaccggcacagctttcccgccctgtactacgaggagggtgccgacagcctgagccagcgcgtgtccttcctcaagccgctgacccgctccaagcgtgactccacctactcgcagctctcccccagacactactactcagggtactcctccagccccgagtactcatccgagagcacgcacaagatctgggagcgcttccggccctacaagaagcaccaccgggaggaggtgtacatggccgccggtcacgccctgcgcaagaaggtccagttcgccaaggacgaggatctgcatgacatccttgattactggaagggggtctccgcccagcagaagctgtga

SEQ ID NO: 481 - DNA, 822 bp, Homo sapiens
  CDS (9)..(458)
  misc_feature (1)...(822): n = a,t,c or g
gcctgggaatgaagccagcctgcctggggcggcccccgccgcgctcccccgggactccgggctgctgtgaggaaagcagcaactcgtggggtcctggtgaagagaaaacgacctggaccctgcaaagcgacccagaacaaagggagcccgccacccacgttatgaagacaaaacactttatgcaaaggggactggactcagaaaccaagaaacaactagaagaagaagaaaagaaaatcattagtgaagagcactggtacttggatttgccagagcttaaagagaaagagagtttcataatagaagagcagagtttcttactatgtgaagatcttctctatggaagaatgtcattcagaggatttaatcctgaggttgagaaattgatgcttcagatgaatgctaagcacaaagcagaagaagttgaagatgaaacagtagagcttgatgcagtcagatgaagagatggctagaagatatgagaccttggtggggacaattgggaaaaagtttgccagaaagagagaccatgccaattatgaagaagatgattaagatggatgccttaagcgatggcccaggggtgcttggtggaagtcagcagcgcatctggagctcatcccaatggtgtctctatagttattaatactgtaacgtttacttgtaaagagattatcattttagaaacatgctgtttttgaaacagatgtgtgatggatggtgatcatcctttgcttcttggtattcattcagagtggatttttagcccctgatctacaaatgtacgtttgtacagggctgctttctaagattnttttacct

SEQ ID NO: 482 - DNA, 495 bp, Homo sapiens
  CDS (56)..(262)
ctgcctgcgtgtggtcttcatccccctcttcatcctgtgcgtctaccccagcggcatgcccgccctccgtcaccccgcctggccctgcatcttctcactgctcatgggcatcagcaacggctacttcggcagcgtgcccatgatcctggcggcaggcaaagtgagccccaagcagcgggagctggcaggtgaggcccgcgggacgtgggggtgggggcgtcctcccagcagcgcaatgcccccctcgcgaggaaacccaggctagaccgcaggaaggtgcatttgggttccgggggttcagaacagtcagtgtctgggaggccgtaggtgtggggacattctcagccacttcattcactcatttattcgttcgttcatcccacaactacttggtgagcccctcctgtggaccaagtgcttttcaaggcaccggggacacagtggcgacaaaacggcgctccccgtgctgtgggactgactgtccagatgtggagg

SEQ ID NO: 483 - DNA, 2963 bp, Homo sapiens
  CDS (529)..(2757)
gagaaactgggagagggaggaagggagaaagtgagaagggaaatcggaaagagaaaagggaggaaacggcagagccagagagaaagaggaagagactgagtgtgaaggagagaggacacaggggatgactgagagacagagagagagagagagagagaatgagacagagacttaaggaagagaccctgtgagtctgacaataaaagatttggacagaaacagaaagattggagagagagagagagggagagaatgagtgagagagagactggaagagacagagatcagagggagacacagaaagtgagagtggggagagaggtagtgtaaaaggaagagagagagagagagaccgtaagagacaggagacaaagagacaaaaagtgtgagtgagcaggtgaggagagagattgagaactatgagagacagcagctaagagacaaaggaggcgggagactgcctaggtgccgcagcacccacaccgtcctcttgcccccccgtcactgggaccccagagctggcccttgatggaggggagccgacctcgcagcagcctgagcctggccagcagcgcctccaccatctcctcgctcagcagcctgagccccaaggacagctcggggctccgtctctggaaacgccgctggttcgtcctctccggccattgcctcttttattacaaggacagccgcgaggagagtgtcctaggcagcgtcctgctccccagctacaatattagaccagatgggccgggagccccccgagggcggcgcttcaccttcaccgcagagcacccgggcatgaggacctacgttttggccgctgacaccttagaagacctgcggggctggctacgggcgctgggccgggcctcccgtgcggagggggacgactatgggcaacccaggtcacctgcacgaccccagcccggggagggccccggcggccccggtggtcccccggaggtgagcagaggggaagaggggcgcatctcagaatcaccggaagtgactcgactctccagaggtcgtggtagacccaggctgctcactcccagccccacaaccgacctccactctggactccagatgcggagggcgaggagccccgacctgttcacccccctctctcgccctccctcgcctctgagcctcccccgtccccgttctgcccctgcgcggcgaccccctgccccctcaggagacacagcaccccctgcccgacctcacaccccgttgagtcgcattgatgtccgacctcctctggattggggcccccaacgccagaccctctcccgaccccctactccccgccgaggacctccctctgaggctgggggaggaaagccccccaggagtccccagcactggagtcaggagcccagaacacaggcacactctggctcccccacttatctccagctccccccgcggccccctgggacccgggcctccatggttttattgccgggtcctcccctggagtcaactttccaccaaagcttggagacagatacgctgctgaccaagttgtgcgggcaggaccggcttctgcggaggctgcaggaggagatagaccagaagcaggaggagaaggagcaactagaagcagctctggagttgacccggcaacagctgggccaagccaccagggaggctggggctcccgggagggcctggggtcgccagcgcctcttgcaggaccggctggtcagtgtgagggccaccctctgtcacttgactcaggagcgagagagggtttgggacacgtacagtggcctggagcaggagctgggcaccttaagagagacgctggagtacctgctgcaccttggttctccccaggacagagtgtctgctcagcagcagctgtggatggtggaagacacgctggcaggtctgggtggcccccagaaaccgcccccacacactgagcctgactccccatctcccgtgctccagggcgaggagtcctcagagagggagagcctgccagagtccttggaactgagctcccctaggtcccccgagactgactgggggcggcctcctggaggcgacaaagacctcgccagccctcacttaggtcttgggtctccgagggtctcccgggcttccagccctgagggtcgccacctcccttccccacagctaggaaccaaggccccggtggcccggccccggatgagtgcccaggagcagctggagcggatgcgcagaaaccaggaatgtggacggcccttccctcgcccgacctccccccggcttctcaccctgggaaggacactgtccccagccagacgccagcctgacgtggagcaaaggcctgtcgtaggacactcgggagcccagaaatggctcagaagctctgggtcctggagtagtccaaggaacaccaccccttacttgccgacttccgaaggtcaccgggagcgggttctcagcctctcccaagccctggctactgaggcgtcgcagtggcacagaatgatgacaggtggaaatttggactcccagggagaccctcttcccggtgtgccgctgcctccttcggaccccacgcgccaggagacccctccccccagatctcccccggtggctaattcgggttccacggggttctctcgccgagggagtgggcgtggaggaggtcccaccccctgggggcccgcgtgggatgccgggatcgcccctccggtcctgccacaagacgagggggcatggcctctgcgagtcactctgctacaatccagcttctaatccgcccaaaagcggcagccaatcggagcgcgaggacgtggtctggaggtaccgccggagatctgggaccactcagggcatcagggggcgtggtctggtccccattgcgggcccgggaggggaatggtttctatggccaaagtttggttttctcaacactgtctaaatttggattaaaactttgaacttttaaaaaaaaaaaa

SEQ ID NO: 484 - DNA, 3071 bp, Homo sapiens
  CDS (529)..(2865)
gagaaactgggagagggaggaagggagaaagtgagaagggaaatcggaaagagaaaagggaggaaacggcagagccagagagaaagaggaagagactgagtgtgaaggagagaggacacaggggatgactgagagacagagagagagagagagagagaatgagacagagacttaaggaagagaccctgtgagtctgacaataaaagatttggacagaaacagaaagattggagagagagagagagggagagaatgagtgagagagagactggaagagacagagatcagagggagacacagaaagtgagagtggggagagaggtagtgtaaaaggaagagagagagagagagaccgtaagagacaggagacaaagagacaaaaagtgtgagtgagcaggtgaggagagagattgagaactatgagagacagcagctaagagacaaaggaggcgggagactgcctaggtgccgcagcacccacaccgtcctcttgcccccccgtcactgggaccccagagctggcccttgatggaggggagccgacctcgcagcagcctgagcctggccagcagcgcctccaccatctcctcgctcagcagcctgagccccaagaagcccacccgggcagtaaacaagatccacgcctttgggaagagaggcaatgcgctcaggagggatcccaaccttcccgtgcacatccgaggctggcttcataagcaggacagctcggggctccgtctctggaaacgccgctggttcgtcctctccggccattgcctcttttattacaaggacagccgcgaggagagtgtcctaggcagcgtcctgctccccagctacaatattagaccagatgggccgggagccccccgagggcggcgcttcaccttcaccgcagagcacccgggcatgaggacctacgttttggccgctgacaccttagaagacctgcggggctggctacgggcgctgggccgggcctcccgtgcggagggggacgactatgggcaacccaggtcacctgcacgaccccagcccggggagggccccggcggccccggtggtcccccggaggtgagcagaggggaagaggggcgcatctcagaatcaccggaagtgactcgactctccagaggtcgtggtagacccaggctgctcactcccagccccacaaccgacctccactctggactccagatgcggagggcgaggagccccgacctgttcacccccctctctcgccctccctcgcctctgagcctcccccgtccccgttctgcccctgcgcggcgaccccctgccccctcaggagacacagcaccccctgcccgacctcacaccccgttgagtcgcattgatgtccgacctcctctggattggggcccccaacgccagaccctctcccgaccccctactccccgccgaggacctccctctgaggctgggggaggaaagccccccaggagtccccagcactggagtcaggagcccagaacacaggcacactctggctcccccacttatctccagctccccccgcggccccctgggacccgggcctccatggttttattgccgggtcctcccctggagtcaactttccaccaaagcttggagacagatacgctgctgaccaagttgtgcgggcaggaccggcttctgcggaggctgcaggaggagatagaccagaagcaggaggagaaggagcaactagaagcagctctggagttgacccggcaacagctgggccaagccaccagggaggctggggctcccgggagggcctggggtcgccagcgcctcttgcaggaccggctggtcagtgtgagggccaccctctgtcacttgactcaggagcgagagagggtttgggacacgtacagtggcctggagcaggagctgggcaccttaagagagacgctggagtacctgctgcaccttggttctccccaggacagagtgtctgctcagcagcagctgtggatggtggaagacacgctggcaggtctgggtggcccccagaaaccgcccccacacactgagcctgactccccatctcccgtgctccagggcgaggagtcctcagagagggagagcctgccagagtccttggaactgagctcccctaggtcccccgagactgactgggggcggcctcctggaggcgacaaagacctcgccagccctcacttaggtcttgggtctccgagggtctcccgggcttccagccctgagggtcgccacctcccttccccacagctaggaaccaaggccccggtggcccggccccggatgagtgcccaggagcagctggagcggatgcgcagaaaccaggaatgtggacggcccttccctcgcccgacctccccccggcttctcaccctgggaaggacactgtccccagccagacgccagcctgacgtggagcaaaggcctgtcgtaggacactcgggagcccagaaatggctcagaagctctgggtcctggagtagtccaaggaacaccaccccttacttgccgacttccgaaggtcaccgggagcgggttctcagcctctcccaagccctggctactgaggcgtcgcagtggcacagaatgatgacaggtggaaatttggactcccagggagaccctcttcccggtgtgccgctgcctccttcggaccccacgcgccaggagacccctccccccagatctcccccggtggctaattcgggttccacggggttctctcgccgagggagtgggcgtggaggaggtcccaccccctgggggcccgcgtgggatgccgggatcgcccctccggtcctgccacaagacgagggggcatggcctctgcgagtcactctgctacaatccagcttctaatccgcccaaaagcggcagccaatcggagcgcgaggacgtggtctggaggtaccgccggagatctgggaccactcagggcatcagggggcgtggtctggtccccattgcgggcccgggaggggaatggtttctatggccaaagtttggttttctcaacactgtctaaatttggattaaaactttgaacttttaaaaaaaaaaaa

SEQ ID NO: 485 - DNA, 1082 bp, Homo sapiens
  CDS (419)..(646)
ggaggaggtgcggccccaaggggaggaggtgcccgctcaccgcagaccgcccgcggcagaggccgccccggtcgcgccgcggcgggagcggccggtggaggctgcgcggccgagggggagggccgggggagcggacgtcgcctctgctggtctcccacctcccgccgccccccgcccgcaggctcccaagccttagtcggcgccgagcatcccgctgccccggaccctcccgcgggcgcgcaccaggctcaactcaggctcaggactgcaggtagacatctccactgcccaggaatcactgagcgtgcagacagcacagcctcctctgaaggccggccataccagagtcctgcctcggcatgggcctcaccattgaggcagctccactgtctgtgctggtctgagggtgctgcctgtcatgggggcagccatctcccagggggccctcatcgccatcgtctgcaacggtctcgtgggcttcttgctgctgctgctctgggtcatcctctgctgggcctgccattctcgctctgccgacgttgactctctctctgaatccagtcccaactccagccctggcccctgtcctgagaaggccccaccaccccagaagcccagccatgaaggcagctacctgctgcagccctgaaggcccctggcctagcctggagcccaggacctaagtccacctcacctagagcctggaattaggatcccagagttcagccagcctggggtccagaactcaagagtccgcctgcttggagctggacccagcggcccagagtctagccagcttggctccaataggagctcagtggccctaaggagatgggcctggggtgggggcttatgagttggtgctagagccagggccatctggactatgctccatcccaagggccaagggtcaggggccgggtccactctttccctaggctgagcacctctaggccctctaggttggggaagcaaactggaacccatggcaataataggagggtgtccaggctgggcccctcccctggtcctcccagtgtttgctggataataaatggaactatggctctaaaaaaaaaaaa

SEQ ID NO: 486 - DNA, 2078 bp, Homo sapiens
  CDS (273)..(1814)
ggcacgaggctccaaagaaggctgaggactcagccccaggaaagatccagtatgaagtccatggaaggtcccaaccagaagaacaggggccaccccagagcccagcgtctgagaccatcaggaaagccacaggacagcaactgactaccaatggggcacagacctttggccctgatcatgctgaccagctgcctgctggtcagaaggagagttcccaggttctaggagttgaaccaggaggcacagtggctgaaccagtgggcccagcagccatgaaccagcttctgcttcaactaagggaggagcttgctgcagtgtggcgagaaaaggatgctgcccggggggctttgtcaagaccggtcatggagggagccctggggactccccgtgctgaggcagcagcagctgcctgggagaagatggaagcccgactggagcgggtgctggcaaggctggaatgggcaaaggcaggactacaggtgaaacctgaggttccttcccaggagtccagagagggagccctaaaggcagccccagggagcatcaaacaggatgaagagaaggagaaaagggttcctggggctcgaggagagcctctaggggcccttggaggggaaaaggccctaggaggcctggcaaagggacagctggagaaggagatgtcagtactgagactgagcaacagtaacttgctggaggagttaggggagttggggcgggagcggcagaggttgcagagggagctacagtccctgagccagcggctgcagcgggagtttgtgcccaagccagaggcgcaggtccagctacagcagttgcgacagagtgtggggctgctgacaaatgaactggccatggagaaggaggccacagagaagctgcggaagctcctggcctcccagagcagcggtctccgagggctgtgggactgcctgcccgcagacctagtgggcgagaggagtgcacaaagcaaagcagcggagtccctggaggagctgcgggcctgcatcagcaccctggtggatcggcaccgggaggcccagcaggtgctggctcggctgcaagaagaaaaccagcagttgcgggggtccttgtccccgtgtagggagccaggcacctccttaaaggccccagcatccccccaagtggccgctctggagcaagacctggggaagctggaggaagagctgcgggcagttcaggccacgatgagcgggaagagccaggagatcggaaagctgaagcagctgctctaccaagccacagaggaagtggctgagctaagggcccgggaggcagccagcctacggcaacacgagaaaactcggggttcgctggtggcccaggctcaggcttggggccaggagctaaaggctctgctggaaaagtataatacggcctgccgggaagtgggtcggctgcgggaggcggtggccgaggagcgccgccggagcggggacctggccgctcaggcagccgaacaagagcgccaggccagcgagatgcgggggcgctccgagcagtttgagaaaacggcagagctgctgaaagagaagatggagcatctcattggggcttgccgagacaaggaagccaagatcaaggagttgttgaagaagctggagcagctttcagaagaggttctagcaattcggggagaaaatgctcgccttgccctgcagctgcaggattcccagaagaaccatgaagagatcatctccacctacaggaatcatctactgaatgctgctcggggttacatggaacatgaagtgtacaatatcctgctgcaaatccttagcatggaagaggagtgaggcagcctcactgtgtgccctcagggatacgagattctctgttggaataagaaaccctggttgacagaggcttcatcaggctgtggtgggcgggggtgttggccactaggcaatggtatgggcagggcttcacctgacattatggacctcagacctgagaacctggaccctggaatcagcatggatgagaccagaggaggtatggatggaaacaagctctatggaaaataaagcatgaggcaggacgggaaaaaaaaaaaa

SEQ ID NO: 487 - DNA, 445 bp, Homo sapiens
  CDS (91)..(261)
cccgacgatttcgagcgtggctgagattcctcatcgctgccggagcagaggcccaggctgttcatcccctacttcttcttccccaaggaaatgcccaaggataaacgtgagcttcagcttcggcgaaaggtcttagcagtcacagactcacctgccaggaagggcaaggactctccctctaagcagagccctggcgagtccacgaacaagccaggatggcctagtgcagattgcaccaaacctgactgggagccagttcattaaagccttccccagggtgctgctgcagaccctacgccaccccagcttcctgcccaagctcccggagcgccaggtttccatgacagactgctactccaacctgctcatcggctagctcgccttcccttcggtcatcgagagcatcgcggtgagcggcgccctgcacaagatgctctaccctgtc

SEQ ID NO: 488 - DNA, 1297 bp, Homo sapiens
  CDS (409)..(723)
gctgtctgcctccggctacggccactacctctcctgcggggccgagggagccgtgcagggtaagcggggccagcgaaatgtgcttggcccggaggactgactacggttggtctccccacgcgcgcgagggacggggttccccgtggtgcagttccaatgcctgatacctccctgggcccggagacagctccggggggaggcctcggggtcacttgcgctctcggtccattcaactggctgtctttccgaccctgctgcgtagccctcgcacgtctacaacacaccgtgggactcgtgagctatgctgtaggccaagcagcaggggtctctgcccgagtgtagcccacagccctgccgcgtccattcattctgctggcttgtgctgacccgcccccagcagactgagaaatgagaaaaataccaaaccatggcaccctgcggatgacgaaggtggcatatcccctgggactgtgcgtgggcctgttcatctatgttgcctatatcaagtggcaccgggcctctgctgcccaggccttcttcaccattgctggggctgcctcgggggcacggtggacccagcaggccttcagctccccaggctcagctgcacgtggtcatgaggtcttctatgggatcatgtttgacgctgggagcaccggcacccgcatccacgtcttccagttcgcccggccacctggaggtaacctgtctaactctgagccctgagttatgggcacagacacaggatctgccttccccactctcagggcaaggctcttgagaattcctgacttcagaagagagtgtgaggcttgagcccctgctccagagtaatgtagaagcctgctgacatgaaattattacggcactggggcaaagctcagtgggagaagcacgtgtaaggccctgggtgtgagtaccagaccacttgaaaaaagaagtacagttactaagagatactcagtggctacaaagcctgtgccgctagcctcccctggagcccaaggctcttcttacatgagtgagcagtgactaccattgatggggagataaggccctagagggcatttagtagcctgtcccctccctgtgtccacagtaggccttgtagctgaacctgtaatttgggccatgtcatgttgatattgggagatcgcaaggcagggaaataactcaagagtcaggctcagggaagccaggatcccaggcaaatcagaacagtagcagaaacctgggactgaggcttgcagatctgctgctgtaggtcctgcatggcactgagggctctggacctcag

SEQ ID NO: 489 - DNA, 6653 bp, Homo sapiens
  CDS (1)..(5844)
atggggaaatgtggcctctgtgtgaacatggtgatggatccaaagggcggcagctggggctgtcagtcacagtcttcccctcggcaagttcttcagaaggagccttttgagattgatggaagctctgtgcagctggtcagtctctcagccattactttggaaacaggaaacgcctcaagacatggaaaacaaagaaaccgcttggaaccaatggataccatatttgttaagcaagttaaagaaggaggacctgcttttgaagctggattatgtacaggtgaccgaattataaaagtcaatggagaaagtgttattggcaaaacctattcccaagtaattgctttaattcaaaacaggtggtatataataaaactacacaaggatgttgtgggaaatgctgtaccagacagtacagtattctctcatccagacacaattttcctattgcagaaaagtattggtatgattctaatcagcatggaaaagatagacttggcatattctcaagatgcctacctgaaaggcaacgaagcttatagcggcaatgcccgcaatatacctgaacctccaccaatctgctatccctggctgccatctgccccatcagccatggcacagccagttgaaatatctcctcctgactcatcattgagcaaacagcaaaccagtacaccagtactgacacaacctggtagggcctatagaatggaaatacaagtgcctccatcaccaacagatgttgcaaaatcaaacacagcagtgtgtgtttgcaatgaaagtgtaaggactgtcattgtgccttctgagaaggttgtagatttgttatccaatagaaacaaccatacaggtccttcacatagaactgaagaagtgaggtatggcgtgagtgagcagacctctttaaaaacagtgtcaagaaccacatcaccaccattatcaattcccaccactcatctaattcatcagcctgcaggctccagatcactggaaccttctggaattttacttaagtctggaaattacagtggacattctgatggaatctcaagcagcagatctcaagctgtggaggctccctctgtatctgttaatcactattcgccaaattcccatcagcacatagactggaaaaactataaaacttacaaagagtatattgataacagacgattgcacataggttgtcggacaatacaagaaagattagatagtttaagagcagcatctcaaagcacgacagattataaccaggtcgtccccaaccgcactactttgcagggacgacgtcgaagcacctctcatgatcgagtgccccagtctgtccagatacggcaacgcagtgtgtcccaagaaagactggaagattctgtgctaatgaagtattgtccaagaagtgcatctcaaggagcactgacgtctccatctgttagttttagtaatcatagaactcgttcatgggattatattgagggacaggatgaaaccttagaaaatgtcaattctggaactccaatacctgattccaatggagagaaaaaacagacttacaagtggagtgggtttactgaacaggatgatagacgaggtatttgtgaaagacctaggcagcaagaaattcataaatcttttcgaggttccaattttactgtggctccaagcgttgttaattctgataacaggcgaatgagtggtagaggagtgggatctgtgtcgcagtttaaaaaaattccaccagatctaaaaacattgcagtcaaacagaaattttcagactacttgtggaatgtcactgcctcggggtatttcacaagacaggtcacctcttgtgaaagtccgaagtaattctctgaaagctccttccacgcatgtcacaaaaccatcatttagccagaaatcatttgtttctatcaaagaccaaagaccagtaaatcacttgcatcagaacagtctgttgaatcagcagacatgggtaaggactgacagtgcccccgatcagcaagtggagactgggaaatccccctctttatctggagcctctgccaagcctgcccctcagtcgagtgaaaacgctggtacttcagatttagaactacctgtcagtcaaaggaatcaagatttaagtttacaagaggctgaaactgagcaatcagatactttagataataaagaagctgtcatcctaagggaaaaacctccatctggacgccagacaccgcagcctttaaggcatcagtcttacatcttggcagtaaatgaccaggagaccgggtcagacactacctgctggctgcccaatgatgcacgtcgagaggtccacataaaaagaatggaggaaagaaaagcctcgagtaccagtccgcctggcgattctttggcttccatcccatttatagatgaaccaactagccctagcattgatcatgatattgcacatatccctgcctctgctgttatatcagcctctacctctcaggtcccctccatagcaacagttcctccttgcctcacaacttcagctccattaattcgccgtcagctctcacatgaccacgaatctgttggccctcctagcctggatgctcagcccaactcaaagacagaaagatcaaaatcatatgatgagggtctggatgattacagagaagatgcaaaattgtcctttaagcacgtatctagtctgaagggaatcaagatcgcagacagccaaaagtcatcagaagactctgggtccagaaaagattcttcctcagaggtcttcagtgatgctgccaaggaagggtggcttcatttccgaccccttgtcaccgataagggcaagcgagttggtggaagtattcggccatggaaacagatgtatgttgtccttcggggtcattcactttacctgtacaaagataaaagagagcagacgactccgtctgaggaagagcagcccatcagtgttaatgcttgcttgatagacatctcttacagtgagaccaagaggaaaaatgtgtttcgactcaccacgtccgactgtgaatgcctgtttcaggctgaagacagagatgatatgctagcttggatcaagacgatccaggagagcagcaacctaaacgaagaggacactggagtcactaacagggatctaattagtcgaagaataaaagaatacaacaatctgatgagcaaagcagaacagttgccaaaaacacctcgccagagtctcagcatcaggcaaactttgcttggtgctaaatcagagccaaagactcaaagcccacactctccgaaggaagagtcggaaaggaaacttctcagtaaagatgataccagtcccccaaaagacaaaggcacatggagaaaaggcattccaagtatcatgagaaagacatttgagaaaaagccaactgctacaggaactttcggcgtccgactagatgactgcccaccagctcatactaatcggtatattccattaatagttgacatatgttgcaaattagttgaagaaagaggtcttgaatatacaggtatttatagagttcctggaaataatgcagccatctcaagtatgcaagaagaactcaacaagggaatggctgatattgatatacaagatgataaatggcgagatttgaatgtgataagcagtttactaaaatccttcttcagaaaactccctgagcctctcttcacaaatgataaatatgctgattttattgaagccaatcgtaaagaagatcctctagatcgtctgaaaacattaaaaagactaattcacgatttgcctgaacatcattatgaaacacttaagttcctttcagctcatctgaagacagtggcagaaaattcagaaaaaaataagatggaaccaagaaacctagcaatagtgtttggtcccacccttgttcgaacatcagaagacaacatgacccacatggtcacccacatgcctgaccagtacaagattgtagaaacgctcatccagcaccatgactggtttttcacagaagaaggtgctgaagagcctcttacaacagtgcaggaggaaagcacagtagactcccagccagtgccaaacatagatcatttactcaccaacattggaaggacaggagtctccccaggagatgtatcagattcagctactagtgactcaacaaaatctaagggttcttggggatctggaaaggatcagtatagcagggaactgcttgtgtcctccatctttgcagctgctagtcgcaagaggaagaagccgaaagaaaaagcacagcctagcagctcagaagatgaactggacaatgtattttttaagaaagaaaatgtggaacagtgtcacaatgatactaaagaggagtccaaaaaagaaagtgagacactgggcagaaaacagaagatcatcattgccaaagaaaacagcactaggaaagaccccagcacgacaaaagatgaaaagatatcactaggaaaagagagcacgccttctgaagaaccctcaccaccacacaactcaaaacacaacaagtcaccaactctcagctgtcgctttgccatcctgaaagagagccccaggtcacttctggcacagaagtcctcccaccttgaagagacaggctctgactctggcactttgctcagcacgtcttcccaggcctccctggcaaggttttccatgaagaaatcaaccagtccagaaacgaaacatagcgagtttttggccaacgtcagcaccatcacctcagattattccaccacatcgtctgctacatacttgactagcctggactccagtcgactgagccctgaggtgcaatccgtggcagagagcaagggggacgaggcagatgacgagagaagcgaactcatcagtgaagggcggcctgtggaaaccgacagcgagagcgagtttcccgtgttccccacagccttgacttcagagaggcttttccgaggaaaactgcaagaagtgactaagagcagccggagaaattctgaaggaagtgaattaagttgcaccgagggaagtttaacatcaagtttagatagccggagacagctcttcagttcccataaactcatcgaatgtgatactctttccaggaaaaaatcagctagattcaagtcagatagtggaagtctaggagatgccaagaatgagaaagaagcaccttcgttaactaaagtgtttgatgttatgaaaaaaggaaagtcaactgggagtttactgacacccaccagaggcgaatccgaaaaacaggaacccacatggaaaacgaaaatagcagatcggttaaaactgagacccagagcccctgcggatgacatgtttggagtagggaatcacaaagtgaatgccgagactgctaaaaggaaaagcatccggcgcagacatacactaggagggcacagagatgctaccgaaatcagcgttttgaatttttggaaagtgcatgagcagagcggggagagagaatctgaactttcagctgtaaaccggttaaaaccaaaatgctcagcccaggacctttccatctcagactggctggccagggaacgcctacgcaccagtacctctgaccttagcagaggagaaatcggagatccccagacagagaacccaagcacacgagaaatagccacgaccgacacacctttgtctcttcattgcaacacaggcagttcttccagcaccttggcttcaacaaacaggccccttctttccataccaccacagtcacctgaccaaataaacggagaaagcttccagaacgtgagcaaaaatgctagttctgcagcgaatgcccaacctcataaactgtctgaaaccccaggcactaaagcagagtttcatccctgtctttaaactgggggtatgtccactctagcaagtaaaaaaactactgttacacgttccagtaactctgtcaatattttcttgtatcagaattgttattatgcagccttcatttgggctggtttcatcattttgcactgtgaaatagctttacagtgcattactacagccagaagaacatatatatatatatatatttaaaaatatatcggatagttgtatacaaatgagcaaggtatttgttgcaacttactacatagcatatacccaaaatcactgaagaaaatcgctggcatcagtgtgcagcaaatttgttcttttggtttcatcactaacaaaagtgcctcatcataaaaatacagttggtttttagggtgccatattgttaaaattagataacttacttacattgaataaacgaatgcgttttattggtaacagatatcattacatttaccagttttaacacaggtggatacagaacttccattctttagtcattccaggtggatctgagttttatattcaaacttttaatacagtttttgagttttgtgtgacttgaatttttaatctttctgtaaaatacgtaacttaaatgaacatattaaatgtgtatcttttcttcagataccagatttgatataatgttgtaacataggtgtgtagatagtggatcctggatggaactggcttctttatcgagaagaatataattctgcatgaggacttaatgaatccaaacctgtgtcatgcctgtgtgcatacccaattaaacactggaaataaaaattgttttggtgaaaaaaaaaaaa

SEQ ID NO: 490 - DNA, 704 bp, Homo sapiens
  CDS (147)..(332)
ccccaataatacagcccctgatgtaactatcactaagggtctataaggcctcaccactctaggaaatgaactagctgaaaattcgggaatgaatgatccctttacaggtgtaatggaaaaaatggtttggtagatggaaaggactaatggcctctattctcacctcccttgtgatcataataggggtgctcattctcttagggtgctgtattataccctgtgtctgcggactagttcaaaagctcatagaaacagcccttaccaagacctcccacaactctcccccaccctattcagataaacgtttatttctaagcaaccaagaagagcagtgaagccagatcctgttagaaatatatgaagaggaaggactacaaaatcaaaaggggaaaattattagacaaaatgagttgctctacaaaggtccaacttcgttgtcctttgttctgtaacctttgttctgtaaactgcccttcccgcagaaactgtctttcccgccgaccaaaactgcccttcactatcactgtaatccatacccctactctatttgaaactgccaatcgggatcagcttacattgtgtggttcaaccaccagccaatgaggaaaaaacacagaagcaaaagctatgatgcattagggttaaaaaccccttcctttccctgtccaatgtgctcttgagactgctacaggcgcaagcagcca

SEQ ID NO: 491 - DNA, 954 bp, Homo sapiens
  CDS (55)..(471)
agacttcggctcggttcccgagacggaatacccaggagtcgagtacttgggcgcatgcggcaaccgtatctcagttctcgcgaggtttcgtcttcccggaagcgttggaggacattccctgttgactgcgtcgcgatgtgtggcgactgtgtggagaaggaatatcccaaccggggtaatacctgcctggagaatggatctttcttactgaactttacaggctgtgcagtgtgcagtaagcgggattttatgctgatcacaaacaaatccttgaaagaagaagatggagaagaaatagttacctatgatcatttgtgtaagaattgtcatcatgtaatagccagacatgagtatacattcagtatcatggatgaatttcaggagtataccatgctgtgtctgttatgcggcaaagccgaagatactatcagtattctccctgatgacccccgacaaatgactctcttattctaaggatccttctacagatctgttataactatattgtgttggtttacaatacagcaagcctgatggtttgtcttatttcattcatactgaaaattctttgcatattttttttctgcttagacttacttattctttgaggaaaaaaggtaatgtaggagctcattgttctctagagctgagctcttctgctaaagttcaaagttcacatcagtgtagccagagtgaagcatctttgttagcagttatgtggtcagaaaacaactagaatgggagcacacctggtgcccagatttggtctcaataacggaaccgggtccctttagaaatgaatggttttagagtggtttaacttacaagatgagctaatttctgtgcgcgaaaatgaggtttgattcacaccaactttggtgggtttcgagtccggggtctgagccgggcaggccatcgttggtccctttattccttgggggctcgaaaaagggc

SEQ ID NO: 492 - DNA, 1515 bp, Homo sapiens
  CDS (212)..(1216)
ctctcgacgcgaacattcggcacgaggtgcgatttcctgtaccagtactggaagttgaagaggaaggtcaacttcaactaagcccctgatcaccccaaagaaagatgaagaggacaatctagccaagcgggacgaggatgtcttatttaggaggctgcagctgttcacgcacctgcggcaggacctggagagggttcggaacctcacttacatggtgacccgcagggaaaagattaaacggtctgtgtgcaaagtccaggaacagatattcaatctttacactaagcttttggagcaagaaagagtttcaggtgtgccttcttcctgctcctcctcctcactggaaaacatgcttttgtttaacagtccttctgttggccctgatgctcccaagatagaggacttgaagtggcattctgcattcttcagaaaacaaatgggtacttccttggttcattcgctgaaaaagccccataagcgagatcctttgcagaatagccctggaagtgaaggcaaaaccctgctgaagcagccagacctgtgtggtagaagggaggggatggtggtcccagagagctttttgggtttagaaaagacctttgcagaagcacgtctcatatcagcacaacagaaaaatggtgtggtgatgccagaccatgggaaaagaagagacaatcgttttcattgtgatctcattaaaggagacttaaaggacaaatcttttaaacagagtcacaagcctctcaggtccacagatgtgtcccagaggcatctggacaacacaagagctgccacctcccctggagtggggcagtcagcacctggcacaaggaaggagatagtgcccaagtgcaatggctccctaatcaaagtaaactataatcagactgcagtcaaagtgcctacaacacctgccagcccagtgaaaaactggggaggattccggattccaaagaagggggaacggcagcagcagggagaggcccacgatggggcctgccaccagcactcagactacccatatttgggcttaggccgagttccagccaaggaaagggcaaaaagcaaattaaaatccgacaatgagaatgacgggtatgtccccgatgtggaaatgagtgactcagagagtgaggcatcagaaaagaaatgtatacacaccagcagcactatcagcagaaggacagacattatcaggagaagcatcttggcttcttgatgcaacagagatgatgcggaagccctttgggctcgtcattgggtttgctagaggagagctctgatgtgggggagaagcagaaacccattaatcctgagctacacaaacacatttacttgcaattcagattaatttttttccagagtcatttttaaatcatttttgtgagaagtttgtgttatttgcaacttgttgaggaaacagaagagtagattgtaaccataagacactgctaagactagaacccgaactgaacactaaaataaaaatgaaatgttttaaagaaaaaaaaaaaa

SEQ ID NO: 493 - DNA, 2105 bp, Homo sapiens
  CDS (248)..(1144)
cgcggtcgtcccggcccggggccccaggtgcgcttcccctagagagggattttccggtctcgtgggcagaggaacaaccaggaacttgggctcagtctccaccccacagtggggcggatccgtcccggataagacccgctgtctggccctgagtagggtgtgacctccgcagccgcagaggaggagcgcagcccggcctcgaagaacttctgcttgggtggctgaactctgatcttgacctagagtcatggccatggcaaccaaaggaggtactgtcaaagctgcttcaggattcaatgccatggaagatgcccagaccctgaggaaggccatgaaagggctcggcaccgatgaagacgccattattagcgtccttgcctaccgcaacaccgcccagcgccaggagatcaggacagcctacaagagcaccatcggcagggacttgatagacgacctgaagtcagaactgagtggcaacttcgagcagggagccggcactgatgagggctgcctaattgagatcctggcctcccggacccctgaggagatccggcgcataagccaaacctaccagcagcaatatggacggagccttgaagatgacattcgctctgacacatcgttcatgttccagcgagtgctggtgtctctgtcagctggtgggagggatgaaggaaattatctggacgatgctctcgtgagacaggatgcccaggacctgtatgaggctggagagaagaaatgggggacagatgaggtgaaatttctaactgttctctgttcccggaaccgaaatcacctgttgcatgtgtttgatgaatacaaaaggatatcacagaaggatattgaacagagtattaaatctgaaacatctggtagctttgaagatgctctgctggctatagtaaagtgcatgaggaacaaatctgcatattttgctgaaaagctctataaatcgatgaagggcttgggcaccgatgataacaccctcatcagagtgatggtttctcgagcagaaattgacatgttggatatccgggcacacttcaagagactctatggaaagtctctgtactcgttcatcaagggtgacacatctggagactacaggaaagtactgcttgttctctgtggaggagatgattaaaataaaaatcccagaaggacaggaggattctcaacactttgaatttttttaacttcatttttctacactgctattatcattatctcagaatgcttatttccaattaaaacgcctacagctgcctcctagaatatagactgtctgtattattattcacctataattagtcattatgatgctttaaagctgtacttgcatttcaaagcttataagatataaatggagattttaaagtagaaataaatatgtattccatgtttttaaaagattactttctactttgtgtttcacagacattgaatatattaaattattccatattttcttttcagtgaaaaattttttaaatggaagactgttctaaaatcacttttttccctaatccaatttttagagtggctagtagtttcttcatttgaaattgtaagcatccggtcagtaagaatgcccatccagttttctatatttcatagtcaaagccttgaaagcatctacaaatctctttttttaggttttgtccatagcatcagttgatccttactaagtttttcatgggagacttccttcatcacatcttatgttgaaatcactttctgtagtcaaagtataccaaaaccaatttatctgaactaaattctaaagtatggttatacaaaccatatacatctggttaccaaacataaatgctgaacattccatattattatagttaatgtcttaatccagcttgcaagtgaatggaaaaaaaaataagcttcaaactaggtattctgggaatgatgtaatgctctgaatttagtatgatataaagaaaacttttttgtgctaaaaatactttttaaaatcaattttgttgattgtagtaatttctatttgcactgtgcctttcaactccagaaacattctgaagatgtacttggatttaattaaaaagttcactttgtaaaaaaaaaaaaaa

SEQ ID NO: 494 - DNA, 840 bp, Homo sapiens
  CDS (498)..(746)
cccttcttttaaaactctctctcttctcagcttgatacccacctttcactttttcactactttgaatgcttttttctttgtaccccttgaaattgaattaaaaattagatttgcaaatgtataggaagattaagaacatctttgaggtgcaggaataaagttgtaagtgcctggactcgagtgatagcactgaaaaggaatcacctgacattttgaatagagcttatacagtagatataataaaaattgtattttgtcatgggctgtaaggaatggtggatataatgtcaatgatcactaagttttagaggatttgaaaggaagaatagtagaatgttttcaaaattaggaagtcagttgggaaagaaccagttttgttcattaggaatggaagtgatactttttttctggtatcaaaacaatcttgactttttctccttctcttagggtatatttccttttttccgatcctgcaacagcctctttaaactgtttaaatgagaatgtccttggctcagagagtactactcacctggcttttcacactactcttcttgatcatgttggtgttgaaactggatgagaaagcaccttggaactggttcctcatattcattccagtctggatatttgatactatccttcttgtcctgctgattgtgaaaatggctgggcggtgtaagtctggctttgaccctcgacatggatcacacaatattactgtgctctggaacagtttactaccatgaatctatcctatgtcttcattcctttatgggccttgctggctggggctttaacagaactcggatattgtcttttttgtgagagactgcttct

SEQ ID NO: 495 - DNA, 5023 bp, Homo sapiens
  CDS (149)..(4426)
agagcagtgcgagcggtcacgtgggccggcggtccagggccggaatggcagcaagctcagagataatcattcaggtcttcgtgagctaaggccaaacaaacaaaaaacacttgctttgatggactgaatactgttattagaagtaaatatggaaaatgaaccagaccatgaaaatgtggaacagagcctctgtgccaagacgagcgaagaagagctgaataagtctttcaatctagaagcttcactttcaaaattctcttacatagatatggacaaggaactggagttcaaaaatgatctgattgatgacaaggagtttgatattcctcaagttgatactcctccaacactggaaagcatactaaatgagactgatgatgaagatgagtcttttgttcttgaggatcctacattgttaaacattgatactattgattctcactcctatgatacttcatctgtggcaagctcagatagtggtgacaggaccaacttaaaaaggaagaagaaattacctgattctttttcacttcatggatcagttatgcgccattcacttttgaagggaatttctgcccagatagtgtctgcagctgacaaagtagatgctggcttgcctacagcaattgcagtatccagtctgatagcagtgggtacatctcatggattggctttaatatttgatcagaatcaagctttgcgactctgtctgggtagcactagtgttggaggtcagtatggcgctatctctgccctcagtatcaacaatgattgctcaagacttctttgtggctttgctaaaggacagatcaccatgtgggatttggccagtggaaaacttctaagatcaataacagatgctcatcctccaggaacagcaatattgcatatcaagtttacagatgatccaactcttgcaatttgcaacgacagcggaggctctgtttttgaattgacatttaagagagtgatgggagtgagaacctgtgaatctagatgtctgttcagtggttccaagggtgaagtctgctgtattgagcctctgcattctaagcctgagttgaaagatcatcccatcacacagttttcattattggccatggcatccttgacaaaaatactggtcattggattgaaaccatccttgaaagtatggatgacttttccctatggccggatggatccttccagtgtgccactgctggcctggcactttgtagcagtacaaaattatgtgaatcccatgcttgccttctgcagaggagatgttgttcattttctattggtaaagagagatgaatctggagcaatacatgttactaagcaaaagcatcttcacctatactatgacctcatcaactttacctggataaattcacgcacagttgtgctcttagacagcgtagagaagttgcatgtgattgatcggcaaacacaagaggaattggagacagtggagatctcagaagttcagctggtctacaatagcagccatttcaaatcactagccactggaggaaatgttagccaggcactggctttggttggagagaaggcttgttatcaatccatcagtagctatggtggtcagatcttttatttggggacaaaatctgtttatgtgatgatgctgaggagctggagagagagagtggatcatctcctgaaacaagattgtcttacagaagcgttggctcttgcgtggtctttccatgaaggaaaagcaaaagcagtagtgggattatcaggggatgccagtaagcgaaaggctattgttgcagaccggatggtagaaatcctattccattatgcagatcgagctctgaaaaagtgcccagaccaaggaaaaatccaagtgatggagcagcattttcaggatatggtgcctgtcatagttgattactgccttctgctgcagcgaaaggatcttttatttagtcagatgtatgataaattaagtgagaattcagtggccaaaggagtatttttggagtgccttgagccatatattttaagtgataaattggtgggaatcacaccccaagtaatgaaagacttgattgttcatttccaagataaaaaattaatggaaaatgtggaagcgctcattgtacatatggatatcaccagcctagatattcagcaggtagttctcatgtgttgggaaaatcgtttatatgatgctatgatctatgtctacaacagaggcatgaatgaatttattagtccaatggagaaacttttcagagtcattgctcctcctctgaatgcaggaaaaacactaacagatgaacaagttgttatgggcaataagctccttgtatatattagctgttgtctagcaggtcgtgcctatccccttggtgacatccctgaagatctggttcccttggttaaaaaccaggtttttgaatttctaattcgcctgcattcagcagaggcttctcctgaggaagaaatctatccttacattcggactttgctacattttgacacaagagaatttctcaatgtattggcactgacttttgaagattttaaaaatgacaagcaagctgtggaatatcaacagcgaattgtggatattttgttgaaagttatggtggagaattcagactttaccccctcacaagtaggatgtctctttaccttccttgctcggcagcttgcaaagcctgacaacaccttgtttgtaaacagaacactttttgatcaggtccttgaattcctttgtagtcctgacgatgactcccgacactctgaaagacagcaggtccttttagaattgctgcaggctggaggcatagttcaatttgaagagagtcgactcatccggatggcagaaaaagctgagttctatcaaatttgtgaatttatgtatgaaagagaacaccaatatgacaaaattattgattgctacttacgtgaccctctgcgagaggaagaagtctttaattacattcacaatatcttatccattcccggacacagtgcagaggagaagcagtctgtatggcagaaagcaatggatcatattgaggaactcgtgtccctgaagccttgtaaagctgcggagctggttgccacccacttttctggacatattgaaacggtcattaaaaaacttcagaaccaggttttgcttttcaaatttttgaggagtcttcttgacccaagggaaggtattcatgtaaatcaagaattactgcaaatatctccttgtatcacagagcagttcattgagctgttgtgtcagttcaacccaacccaagttatagagactctgcaagtccttgagtgctaccgtctggaagaaactattcagattactcagaagtatcaacttcatgaagtcaccgcttatctattggaaaagaaaggagatattcatggtgccttcctaataatgttagagagactacaaagcaaacttcaagaggtaacacatcaaggtgaaaataccaaagaggatccctcattgaaggatgttgaagatactatggtggagaccattgctctttgccagagaaattcacataatttgaaccagcagcaacgtgaggccctttggtttccgttattggaggcaatgatggcccctcagaagctgtccagttcagccattcctcatctacactctgaagctctgaagtctttgaccatgcaagttttaaatagcatggcagcatttattgcccttccatcaatcttgcaaagaatcttacaggatccagtttatggaaaaggaaaacttggagaaatccagggacttatcttgggaatgttagatacctttaactatgaacaaaccctgctggaaacaacaaccagccttctaaaccaagatctccattggtcattgtgtaacctgagagcttcggtcaccagaggactgaatcccaaacaagattactgctctatatgtttgcagcagtacaagagacgccaagaaatggctgatgaaataattgtctttagctgtggccatttgtatcactcattctgcctacaaaacaaagaatgcactgtggaatttgagggccaaacaagatggacatgctacaaatgcagttcaagtaacaaagtaggaaaactcagtgaaaattcatctgaaattaaaaagggaaggataaccccatcacaggtaaaaatgtctccatcgtatcatcagtccaaaggggatcccactgctaaaaagggaacctcagaacctgttctggatccacagcaaatccaagcatttgatcagctttgccgtctctaccgaggaagctccaggctggctctcctcacggaactctcccagaatcgcagcagcgagagctataggccattcagtggctcgcagagtgctcctgctttcaacagcatcttccagaatgagaacttccagctgcagctcattcctccacctgtgactgaggattgatgactccatggagcctggcccaggagaaccagagatgatcccgaggcagctggggagaggccccgcctctggtgggcttggcctccaccacctcccatgcttctgagaagaggttccaaattgggcttctgtgcccagagcgtccacagcaccattcccagtgtagactcccagtcttctccacattgctgtcatggcgtcagttcaccagactcattgattttgttttgcttgttaagcaaaggaatgtcacatacctctgtccagctttttaggaaatacatttcgcctattgcgactttttccatttaccctgaagcctagaaagtaggtggaactcacacaaatggcattccagagtctgccatactccgtctcctccagctgctggataatacagaggaacttcaacttctacagggaacagtggttggccaggctgcagtataactgaagcatgccttggagagagcagacactgtgggggccagggccatctccctttaatgtgttcatgttaaaacctatttgagtgtaagacttgccctttctaacaataaatgctctgtgtttaagttcaaaaaaaaaaaaaaa

SEQ ID NO: 496 - DNA, 977 bp, Homo sapiens
  CDS (192)..(881)
tttaataagaccgtggaattctcgactcgaatagggagagggataccgagcgcgtccgtagtggcggctggcgctagggaactgcagggtctagggtgttgtcggagtggcagttggtccgaatttctcccgaagcccgcggaggagcggcgcgccgcgattcaccagcctggtcccttctgcggagagcgatgccgcttcccgacaccatgttctgcgctcagcagatccacattcccccggagctgccggacatcctgaagcaattcaccaaggctgccatccgcacccagccggccgacgtgctgcggtggtccgcgggctatttttcagctctgtcgagaggagatccacttcctgtaaaggacagaatggaaatgcccacggcaacccagaaaacagacacaggcctgactcaaggactcctgaaagttttgcacaagcagtgtcaccacaagcggtatgtggaattaacagatcttgagcagaagtggaagaacttgtgcctgccgaaggaaaaattcaaagcgctcttacaactggatccttgtgaaaacaaaatcaagtggataaactttttagcgcttggatgcagcatgcttggtgggtccttgaacactgcgctgaagcacctgtgcgagatcctcacggacgatccggagggcgggcccgctcgcatccccttcaagacgttttcctacgtttaccgctacttggccagattagactcagatgtgtctcccttggagacggaatcctaccttgcctctctaaaggaaaatatagacgccaggaagaacggcatgataggtctttcagatttcttctttccaaagaggaaacttttagaaagcattgaaaactctgaagatgtaggccattaatacagagaagaatacattttaatgtcaaaatagtgctctttaaaattctggcaccaaatacaacttaccctgaatcacaaaaaaaaaaaaaaa

SEQ ID NO: 497 - DNA, 1776 bp, Homo sapiens
  CDS (261)..(1088)
catccatcatggcgtctacagccgcatgggcgtgcgtccctctgtttatatggccagagccccgcctcgctccgcccctttaaacttggtgggcggaccgaggcggggctcagaccaggccccaccccgatcagccacgtccatcgccctgatttccaggccctcccagtccctgggcgcacgtcccggattcctcccacgagggggcgggctgcggccaaatctcccgccaggtcagcggccgggcgctgattggccccatggcggcggggccggctcgtgattggccagcacgccgtggtttaaagcggtcggcgcgggaaccaggggcttactgcgggacggccttggagagtactcgggttcgtgaacttcccggaggcgcaatgagctgcattaacctgcccactgtgctgcccggctcccccagcaagacccgggggcagatccaggtgattctcgggccgatgttctcaggaaaaagcacagagttgatgagacgcgtccgtcgcttccagattgctcagtacaagtgcctggtgatcaagtatgccaaagacactcgctacagcagcagcttctgcacacatgaccggaacaccatggaggcgctgcccgcctgcctgctccgagacgtggcccaggaggccctgggcgtggctgtcataggcatcgacgaggggcagtttttccctgacatcgtggagttctgcgaggccatggccaacgccgggaagaccgtaattgtggctgcactggatgggaccttccagaggaagccatttggggccatcctgaacctggtgccgctggccgagagcgtggtgaagctgacggcggtgtgcatggagtgcttccgggaagccgcctataccaagaggctcggcacagagaaggaggtcgaggtgattgggggagcagacaagtaccactccgtgtgtcggctctgctacttcaagaaggcctcaggccagcctgccgggccggacaacaaagagaactgcccagtgccaggaaagccaggggaagccgtggctgccaggaagctctttgccccacagcagattctgcaatgcagccctgccaactgagggacctgcgagggccgcccgctcccttcctgccactgccgcctactggacgctgccctgcatgctgcccagccactccaggaggaagtcgggaggcgtggagggtgaccacaccttggccttctgggaactctcctttgtgtggctgccccacctgccgcatgctccctcctctcctacccactggtctgcttaaagcttccctctcagctgctgggacgatcgcccaggctggagctggccccgcttggtggcctgggatctggcacactccctttccttggggtgagggacagagccccacgctgttgacatcagcctgctttttcccctttgcggctttcactgctgagtttctgttctccctgggaagcctgtgccagcacctttgagccttggcccacactgaggcttaggcctttttgcctgggatgggctcccaccctcccctgaggatggcctggattcacgccctcttgtttccttttgggctcaaagcccttcctacctctggtgatggtttccacaggaacaacagcatctttccccaaaatgggtggccccaaccctgctgggacttggatcccaggggcttatctcttcaagtgtggaaagggcagggtccacgcctttgctgtagcttatgaaattaactaattgaaaattcaaaaaaaaaaaaaaaaaa

SEQ ID NO: 498 - DNA, 2906 bp, Homo sapiens
  CDS (321)..(1898)
agtactacgagccacagctgtgcctctcctgcctcacgggcattacggctgccgttggaagcgctaccagcgctcccatgatgataccacaccggatagcgtctgggcctgcacactccaggacctgactcagaggaggtcctcggacaagatttactgaatgaacaactggaaggaggattgagcatatgtgttcatgatgggagcgcctctggttcctgctcctcaccttcacctttggcctcacgctcacctggctttacttctggtgggaagtccacaatgactatgatgaattcaactggtacctctacaaccgcatgggctactggagcgactggcccgtacccatccttgtgaccacagctgctgccttcgcatacatcgctggcctcctggtcctggcactatgtcacattgccgtggggcagcagatgaacctgcactggctgcacaagatcgggctggtggtcatcctggcttccacggtggtggccatgtcggccgtggcccagctgtgggaggacgagtgggaggtgctgctgatctccctgcagggcacagcgccattcctgcatgtgggggctgtggcagcagtcaccatgctctcctggatcgtggcaggacagttcgcccgtgcagagcggacctcctcccaggtgaccattctctgtaccttcttcaccgtggtgtttgccctctacctggcccctctcaccatctcctctccctgcatcatggagaagaaagacctcggccccaagcctgctctcattggccaccgcggggcccccatgctggctccagagcacacgctcatgtccttccggaaggccctcgagcagaagctgtacgggctccaggctgacattaccatcagcctggacggcgtgcccttcctcatgcatgacaccaccctgcggcgcaccaccaacgtggaggaggagttcccggagctggcccgcaggcctgcctccatgcttaactggaccaccctgcagagactcaacgctggccagtggttcctgaagactgaccccttctggacagccagctccctgtcaccctccgaccacagagaggcccagaaccagtccatctgcagcctggcagagctcctggagctggccaagggcaatgccacactgctgctcaacctgcgtgacccgccccgggagcacccctaccgcagcagttttatcaacgtgactctggaggccgtgctgcactccggcttcccccagcaccaggtcatgtggctgcctagcaggcagaggcccctggtgcggaaggtggctcccggcttccaacagacatcaggctccaaggaggcagtcgccagcctgcggagaggccacatccagcggctgaacctgcgctacactcaggtgtcccgccaggagctcagggactacgcgtcctggaacctgagtgtgaacctctacacagtcaacgcaccgtggctcttctccctgctgtggtgtgcgggggtcccatccgtcacctctgacaactcccacaccctgtcccaggtgccttcccccctctggatcatgcccccggacgagtactgtctcatgtgggtcactgccgacctggtctccttcaccctcatcgtgggcatcttcgtgctccagaagtggcgcctgggtggcatacggagctacaaccctgagcagatcatgctgagtgctgcggtgcgccggaccagccgggacgtcagcatcatgaaggagaagcttattttctcagagatcagcgatggtgtagaggtctccgatgtgctctccgtatgttcagacaacagttatgacacatatgccaacagcaccgccacccctgtgggcccccgagggggtggcagccacaccaagaccctcatagagcggagtgggcgttagctgaagacatgtctgtcccacctgtacctgacacagaagctggggagcctaggagagctggtggaagtgtgtctgaactcggagtgctctgggagcgggctccacagcctccttgtgggctccagccccttgtcagccgcagcctctcttgagggggactccctgtcccctgaggcccagctgggccaggactccatcctttcagatgcccctgcaggcctggggctccttctgggaagtatggggcctagggcttggtccccctcttctgaggccctctcctgtatcccgacctggaagctttgatgggtcatgggccatgccataccccctgtggcaatggagtgtgtggatgctcacctgtgccatctgtcctcctgtctgtgccaggaggcacctgagttctctgctgttatcctgccccaagggcctgggccgagcctctacctgaagcaactctgctcttcctgtcagtctcaaagcacaaggaggttcagcccaggaggaagccagctgcaatgtggagacacgtcctcctccccaacccacctcatgccaccgccaaccccctgccccaggagcgggcctgagccacgtcccctaggagcagctggagatggccaaaagagtgagctcaggactactggatcccatgcccaggtgtccagcagacctcaaggcagaagggtcacctaacccaggagtccacagactgatgtgacctcaggttcccacatcagtggccacagggcagggcccacctggtagaagtgttctggatatggccagggtgggtgtgtggctaagtgggcctgaacagagggaacctagggcccttggccaatgtgataaatgtctttaaaaataaacaacataacctgccccttacgcctgtcattcagcctggcaggtccttagtgggctagacctacctttctgatgagctgcccgcccccagcgcaagatgattgtttgagaggtaaaaactcttgccaaaaacaacgt

SEQ ID NO: 499 - DNA, 1389 bp, Homo sapiens
  CDS (1)..(639)
atggcggcggcggcggctgcaggcgaggcgcgccgggtgctggtgtacggcggcaggggcgctctgggttctcgatgcgtgcaggcttttcgggcccgcaactgggtgactgctgaggttggaaagctcttgggtgaagagaaggtggatgcaattctttgcgttgctggaggatgggccgggggcaatgccaaatccaagtctctctttaagaactgtgacctgatgtggaagcagagcatatggacatcgaccatctccagccatctggctaccaagcatctcaaggaaggaggcctcctgaccttggctggcgcaaaggctgccctggatgggactcctggtatgatcgggtacggcatggccaagggtgctgttcaccagctctgccagagcctggctgggaagaacagcggcatgccgcccggggcagccgccatcgctgtgctcccggttaccctggataccccgatgaacaggaaatcaatgcctgaggctgacttcagctcctggacacccttagaattcctagttgaaactttccatgactggatcacagggaaaaaccgaccgagctcaggaagcctaatccaggtggtaaccacagaaggaaggacggaactcaccccagcatatttttaggcctcatctcagtgcctatgaggggcctgccagaaaagtcactaacctgtctcagtgtggccttgtccagccttgtgttttctgtaacccctgtttgtggtacgagataatgagtcctatttttctctcacataatatgcatttgctctcctaggacagtgtaatacatttatgtgaagtaaagacatgcgagactggtggcctgcaaatagcatccgtcaatctgtgttaactgcatagggaggctctgcatagcacctgctatagcggtgtcatgttggatcgcttttgtgactgttcatctgtccttgacagtggctgtcatcttgactactttgttgatttgttggtattggggacattttaaaggctgagttatttttgaatgtcatgtttatgtcatagacgtagttttcgcatccttgaattaaactgccttaactccttttgtggtataagcaaaactccatggactctgtcctggtatccttttcctgtgtggttgccctgtgtcctctggcctagggttaagtgtgcaagataactactcgtgagtattcagaatgttgttcctaataaatgcacttgttgtctgtcttctttaatcaaatcacatcttacatacagcagtcagagatgagtatactagaatcatggattgctggaggtcttttaatctggtgttctcggaagggggtggatttaaatcctgaaataaatatttcaacacaagaaaaaaaaaaaaaa

SEQ ID NO: 500 - DNA, 2791 bp, Homo sapiens
  CDS (550)..(984)
tttcgttgagagaggatacttcctactgtggaaggggagaaaagaaaaaagcaaagctcactgtcctatgtcacctgtcctgagacattcctagaaggaagaccaacagacagcattcttgagctattccaaagagatcacagaggccaccaccaaagagaagactaagaatctaccatagtttgccccgagaggaagtccctgtaccctgtggaggaagagaggccttgatggagagaacccagaggccaaaggccagcaccacctgcttggcattaactacttcttggaagagcagtggagagaaaaatattgtttctttttcttgggaaattggcagaggcatgctgaagaaatcagctacagctgttctccacacctggataaatttttaataagaacttaacacacccgccctccagaaagggtggtctgaggtgtcgatggtgttgtctctcccagggctcttctgggcagccttctctgtgacctggagagcgaagagtctatttccatcacatttcagctgcccaaactcccctttaaacgatggatgaaaattataacctcttgcctcacggagtcaatttccaagatgccatcttcccagacactcaagagaacagaaggatgttttctagccttttccagttttcaaactgttcgcaagggcagcagctggcgactttctccagtgactgggaaatccaggaagacagtaggctcatgtgctcctcggtgcagaaggccttgtttgaggaggaggaccacgtcaagaaactgcagcagaaagtggccaccctggagaagcgcaaccggcagctccgggagcgagtgaagaaggtcaagaggtccttgcggcaggcgcgtaagaagggccgccacctggagctggcgaaccagaaactcagtgagaagctggcggcgggcgcgctgccgcacatcaacgcccgggggcccgtgcgccccccctacctgcgggggtaacgggcctgggggctgccaggtgtgcagggccaatcctggcggtaattgagaatgagtgaggtttcgtacatgcagctatttcaagggttgtaagagtttttttttttaatcacgcatttggtagagtctaaatggataaaatgcaaggcttgctttccccttgggtgctggcctcaatgtcagaccccacgcgctgccccttcctggcctgaccccagacgcagtgcctggcagtccagaggcagtgggatccctgagtgctgaatgctcgcctgcagagcagcccagaaagagccctgactggggagagaacattttagaatctctagtgtaaaagacatcaacgtgcttagcctttatttcagaaaaaaatcagggtggttcccagctccccagtccaggacaaccattagtcctgatgagtgagctgacgctggtgctggaacctgctggcacctcactggccacatctttggaaggggatggtggccttgcatccaagatgcctgaaaatcagcacgtgcagggcctccctatccagccagcattttccttccagctgaggcaggtgaagacttcataagctcatcacaggggagggaattaggagcagggcagcaggtaattaaacaagataaattatacctgatttccaacaccagctacaaagagttgaagatgatacctatgggtcgcgttaacacagggggcaactgccttgatcggcctgccatgggtcatcagactgcttcctaaattgagagaaactgagcaatctctcagccactgctatagtctaacttcttgtttgctgagtaattgtttctaatgtctctgaactcaaagtgaggtgctccaagacgctgtgaacttctgcaaagacacctccttacctactgggatcacgtgacctgacctcactcccagccaggctcccaaagggctcattccagccattccaatctcttcttctttatgcaaacacttttcccccacaacaagccttgtttgttccgataggaatacgtgtacgtcagtgcacttgtccttacgtcagttccttacaccaccaaagcacttcacctttctggaaataaaacttttaagacactactataagtaaaaatgagagtattcactagacttattgctcaggcacatttgagtgggtcccagctgtgtgattaagaagtcaactgggtggccttttctgggttatcttctgatcatggcctttcaacccaacaagggcccttccctgctcttccaccagtaaaggctcctggcctctcatcaggatctgccccccagagacccccccagacactgcagggcctggtgatgctgtcctctgtaccggaaatggcaggcactgtcagatttccactcttctgcctttaggaaggctgggtgcttcttgctctgacagccagtctggggagatgactcttacgttgcttgagtcttggtggcaggctgctgtccacgggggagaagtctctgctctggactggacagaagagagacttttaccctggggcactcacacggccaagcttctgccaccacttcattagctgtattctccatagtatggtgaaatagcaggtgcgtcttctagtttattcctcctggggacatttcctcaaagcagttttgcgcccccgcaagggaatggtcagcctaagggtaatgtacagcccgtgcttggagaaccatggaagctacacccctacaggtgcatactgttctgcttttccaataaatacgagcggcgatttcaaccacaaaaaaaaaaaaaaaa

SEQ ID NO: 501 - DNA, 1120 bp, Homo sapiens
  CDS (396)..(995)
ggacactttgagttacttataatagtgtatactataagatataaagcagtcataattacctaagcttcaaaaatcttttgtttccatgtccagagacaagtacagtacagtattcttatttgtttgctccccctttttaaaatatttaatagcttatgttcacttctcatagctcctttctttatgaaaaataacatgaaaatagaaaagttgttctaagtatactttttgtatatattctagacttatcagatgtagacttcctagatgattcttcaacggagagtttgcttctgagtggggatgaatacaatcaggactttgattcaaccaattttgaggaatctcaggatgaggatgatgctcttaatgaaattgtgcgatgtatttgtgagatggatgaggagaatggcttcatgatccagtgtgaagagtgcttgtgttggcaacacagcgtgtgcatggggctgctggaggagagcattccagagcagtacatctgctatatctgccgggacccaccaggtcagaggtggagtgcaaaatatcgttatgataaggagtggttgaataatgggagaatgtgcgggttatcatttttcaaagaaaattattctcatctcaatgccaaaaagatagtttctacacatcacctgcttgctgatgtctatggtgttacagaagtgctacacgggctacagctgaagattggaatactaaagaataaacatcatcctgaccttcatctctgggcttgttccgggaagcgaaaagaccaagatcaaataatagctggggtggagaaaaaaatagctcaagacacagttaatcgagaagaaaaaaaatatgtacagaaccataaagaaccacctcgtttgcccctaaaaatggaaggaacttatataacaagtgagcatagctatcaaaagccacaaagttttggtcaggactgtaaatctctcgcagaccctgggagctcagatgatgaagaagtgtaatgatagttgggaggagagaccaagaattcacacatgagaagtaaaaaacagtttacagtactcagcaaaagaacatggaatgcctgaaaagaatccagctgaagggcatacagtatttgttt

SEQ ID NO: 502 - DNA, 683 bp, Homo sapiens
  CDS (487)..(645)
ctaaagataactgcattgtaatttatagaatgcatagaagggagataaggaaatcaggaggccatgaaatcccagtgagccaagcctccgtcacccaccatgtaaagcacggaggcagcttgaaaagacattgagagaagtaaacccacaggttcagtggccagtggcaaaggacaagagccacagaggcactgggacctgaaagctaagagagcagggatgcgggtcacagagggagggatgtttggggctacaggtggatagaaaggaagatggagttgagtttttgacctgttgacttaccgtagtggtaggatacctggtgaggcttgtggcctgcattgggcattctgggtcacaactctgaatgaggttggagcagaggtccagctgtggtgaggattggcacagtcgtgcttgtgggactcctccttggtccaactctaatgctcaacctacaccatcacccctgtgcttgctcctctaatgcctaagcactgtcattcctttatcactagtagttgcctgttgggtttgctccatttgtcctcacagtttagctgccctggaaggaaactccaccctgttcagagacacactgaggctgagacccaagggaggcccctctctgattggacagcctcttgatagaactggggaagctccctcaacagccatcaggt

SEQ ID NO: 503 - DNA, 1503 bp, Homo sapiens
  CDS (998)..(1261)
gtatcagctgatcaattttaaaatgccttagactggggatatattagaggaagcagattgtcaaattaagggtgtcattgtgttgtgctaaacgctgggagggtacaagttggtcattcctaaatctgtgtgtgagaaatggcaggtctagtatgggcattgtgattgcattgcagatggagccccgtgacctctcacctacccacctgtttgcctgccttcttgtgcgtttctcggagaagttcttagcctgatgaaataacttggggcgttgaagagctgtttaattttaaatgccttagactggggatatattagaggaagcagattgtcaaattaagggtgtcattgtgttgtgctaaacgctgggagggtacaagttggtcattcctaaatctgtatccaggacgctaccatttaaagtttgcagatgagctcatggagggcaatcttaaaaagtccacagcagatgcatccggctcgaggggccatcagctttgaataaatgcttgttccagagcccatgaatgccagcaggcacccctcctttcctggggtaaaggttttcagatgctgcatcttctaaattgagcctccggtcatactagttttgtgcttggaaccttgcttcaagaagatccctaagctgtagaacattttaacgttgatgccacaacgcagattgatgccttgtagatggagcttgcagatggagccccgtgacctctcacctacccacctgtttgcctgccttcttgtgcgtttctcggagaagttcttagcctgatgaaataacttggggcgttgaagagctgtttaattttaaatgccttagactggggatatattagaggaagcagattgtcaaattaagggtgtcattgtgttgtgctaaacgctgggagggtacaagttggtcattcctaaatctgtgtgtgagaaatggcaggtctagtttgggcattgtgattgcattgcagattactaggagaagggaatggtgggtacaccggtagtgctcttttgttcttgcttcgtttttttaaacttgaactttacttcgttagatttcataatactttcttggcattctagtaagaggaccctgaggtgggagttgtgggggacggggagaaggggacagcttggcaccggtcccgtgggcgttgcagtgtgggggatgggggccgtgagcagggtcctagccgcgagcctcaccccacttaacatatcctgcggggaggaggagccccaggggtgctagtctggactgctgggactcgcgccctggggcctcagagggaccccggctgccactgacatatgaagattatggttctgccagggctcccctccctgcctgtccccaagtcctcacctcaaactccctccaagtcccatgtatataggtcctgatgccttcccaaccccgcccctcaccctgttgccaccttgtttcatttgtaaaaggaaatacagaaacccccccaaaaaaaaaaaaaa

SEQ ID NO: 504 - DNA, 1329 bp, Homo sapiens
  CDS (13)..(981)
gcggcttttggcatggcgactttttctggcccggctgggccaatcctgtcgcttaatccgcaggaagatgtcaagtttcaaaaggaggtggcgcaggttcgcaagcgcataacccagggtctcccaagtggattcgaccgaatcagggaccgacctcttaagcttgcaggccacggtttccgagacgaaagggtttacgctgttcgcgaaaaaaacctggaacaacttactcctggagtagtctatgtgcgccacctacctaacctacttgacgaaacccagatcttttcatatttctcccagtttggcactgtgacacggttcaggctgtccagaagtaaaaggactggaaatagcaaaggctatgcatttgtggagtttgagtctgaggatgttgccaaaatagttgctgaaacaatgaacaactacctgtttggtgaaagactcttggagtgtcattttatgccacctgaaaaagtacataaagaactctttaaagactggaatattccatttaagcagccatcatatccatcagtgaaacggtataatcggaatcggacactaacacaaaagctacggatggaggagcgatttaaaaagaaagaaagattactcaggaagaaattagctaaaaaaggaattgactatgattttccttctttgattttacagaaaacggaaagtatttcaaaaactaatcgtcagacgtctacaaaaggccaggttttacgtaagaagaagaaaaaagtttcaggtactcttgacactcctgagaagactgtggatagccagggccccacaccagtttgtacaccaacatttttggagaggcgaaaatctcaagtggctgaactgaatgatgatgataaagatgatgaaatagttttcaaacagcccatatcctgtgtaaaagaagaaatacaagagactcaaacacctacacattcacggaaaaaaagacgaagaagcagcaatcagtgattttcaatgtattatatttcttttgaaaaatataatatttttatgagagtggactttgtatttcactaggtacaatggaatacaacctttgacaagattttcagaggaaaaatacactgtttggtcaagttaagcgcaaagccggtgtaatttggatggctgccttgggtgaaatacaggcgtgctacatctgcagggtggtgaattgcttttgcggcctaggttcttgaaattcaaaggctcctagtaactgccgaaaaaatggccacggcggtactaagggctttgggcaaaaaccaccgtgccccacggggggcaccgggggcaccggggggttatggggcc

SEQ ID NO: 505 - DNA, 2175 bp, Homo sapiens
  CDS (569)..(1864)
tttcgtgaggccctaagatcccagaggatgccataagaggaaaagtcaggggagtgttgaagactctgcctcctacaaatatgattgttggagtacaaaatgacagtatgagcaagtgaaatggtatgcctagtaccagtgagagccctcagtaaacagtaggcagcaaccaagctggtgggaagcctcctatccaggaggatgcaaattgttgacttgcaagatgatgaggatttccagatagacacagtctattcctgcagtgatggtgtcataccagcccatggaacagtgcccatcaaacaagatgccaccggaaatgtcatcttctccccagacgctggcttgcaagcacagcagcacccagaggctaacctatttcccctatagcccaagctctgagatctcccgtctggtcacaatgatctacaggagaggaagaaagctatctagggacgagatctagaatcaactgagagagatgcttaaaaatcaccagttactttaatgaccatccgcagagccatcctgtgcaaaggaaggagctaggctgtgcgccctgggcgtcatgatccttctgcgggcctccgaagtgcggcagctgcttcacaataagttcgtggtcatcctgggggactctgtgcatagggcagtatacaaggacctggtgcttctgctgcagaaggaccgcctgctcactcccgggcagcttagagcaaggggggagctgaacttcgaacaagatgagctggtggacggaggccagcggggccacatgcacaacggccttaactaccgtgaggtccgcgagttccgctccgaccaccatctggtgcgtttttacttcctcacccgcgtgtactccgattacctccagaccatcttgaaagagctgcagtcgggcgagcacgcccccgacctggtcatcatgaattcctgcctctgggacatctccaggtatggtccgaactcctggagaagctacctggagaacctggagaacctgttccagtgcctgggccaggtgctgcccgagtcttgcctcctggtgtggaacacggccatgcctgtgggcgaggaagtcaccgggggttttcttccgcccaagctccggcggcagaaggccaccttcctgaaaaacgaagtggtcaaagccaacttccacagcgccaccgaggcacgtaaacataacttcgatgtactggacttgcatttccacttccgccacgcgagggagaacctgcactgggacggggtgcactggaatggacgtgtgcaccgctgcctctcccagctgctgctggcccacgtggccgacgcctggggtgtggagctgccccaccgccaccccgtgggcgagtggatcaagaagaaaaaacctggcccgagagtcgaagggccgccccaggccaacagaaatcacccggccttacctctgtccccacccttaccttcccccacataccgccccctgcttgggttcccaccccagcgcttgccgctgctcccgctcctgtccccacagcctcctcctcccattctccatcaccagggaatgccccggttcccacagggtcccccagatgcctgtttttcctcagaccatactttccagtcggatcaattctattgccattcagatgtcccctcatcagcccatgcaggtttcttcgtcgaagacaattttatggttggtcctcagctgcctatgcccttcttccccacaccccgttatcagcggcctgccccagtggtacataggggttttggcaggtatcgtccccgtggcccctatacgccctggggacagcggcctcgaccttcaaagagaagggccccagccaatcctgagccaaggcctcaatagacggacctaggccttatttcctctttatgaacatggattggacagatctgacacttcctttccattgcttggcctgaacagactgaccttgttaacttaagcctggagtccatgcctcgtcttccttttgttcattgctgttaccaagaaagccaaggaagagcagcctgactcattcttcttggctgcagcctcttccccacttcctgggagtgacccagcgttattcctgcctcctcactcctattctctttgcctttgtgtaaaaataaaatggaaataaacaagttgcacagaaaaaaaaaaaa

SEQ ID NO: 506 - DNA, 2525 bp, Homo sapiens
  CDS (507)..(2522)
agcagctcagcaggataataagcttactcgcctgaccttgggtctctctctcatcctttctcttggctaaccttcattttggtgccaaaacccaggaaggggataggctctggctgggcgtccttagaggattctctctctctctctcctatcatcccttacccagccaacctccccttcccgaacctgctaaagaccctaaggatctcccaaaattctcccattgttggccacctcatccaccatcaaagcctctgagaggggtgagtaagagagacttttgcctattacctggaacccttgaccatctcttcactcccaaaagacccagcgctgggccaagggcttcctctggcctccaggcctctggttcctctgtttcctggacgcctgactccgcagctacctcctctattccatacaaggcctgcaagacaggcgccgccctctctcgtctttgtcgtctgtggtcccttcttcctctaccctcacctcctccattcactatgggagcctctcagtctacccctcccaagaccaccccccttgggtgtctcctccgcaatcgcaaggctctcggcctccgttcagggatccgttctaagaggcttatcttttactgcaatactgcatggcctcaataccaattggacaatggctcccaatggcccgaaaatggcactttcgatttcaatatacttagagacttagacaacttttgccatcgcaatgagaaatggtctgagattccttatattcaggctttcttcattctccgtaaccacccttctctctgccactcctgctctactttccaaatcctactcaccagctcaaaacctgactcatctcccgtcaccccacccacagacccagccgatgactcctcttcctttgaccccgtggattttctccctcctcgacagcatcatgatcctccaccagagcatcatgatcctccaccgtatgtccctgctccggctctacccctctcccccactctctccaaccaacccacttctgactctgagtcctctctgcctcctcccctcacccgctctcgggcccaatgtgctcagcaaccagctcccttgcttcctctccgggaagtagcgggagttgaggggatcgtccatgtccacgtccctttctccttctacgatctcttacagattgaagaacgtctcgggtccttctcctccgatcctgatacttacatcaaagaatttaaatatcttactcaatcttatgaactcacttggcatgatctctactttatcctctcttctaccctccttccagaagagaaggaaagagtgtggctcgcagcacaggcatatgccgatgaccttcatcagcaggatcctactaagcccgtaggagctgctgctgttccctgggaagagccttcctgggaataccaacccacagaccctggccaaagtcccctcctgctcctctccgctagtccggcccctgacccctttccccagtacccacttcctgcctctctcattaacccttccgtagctgctcaccatgaccccatcagaatccagttaaaagactcttccaaatttcccaatgttcctcaataccccatctctctaacccaccaaaagggcctacagcccatcgtaaacaagctctgctcatgcagtcttcttagaccaacacactctccatataacacccctatcctccctgttaaaaagtctgatggctcataccgactcgttcacaacctccgagccatcagtcaagctgtcctccctattcatcccatagtccataacccctatccacttctctctctcgtcgctaccaacaccaccctctacactgcaattgacctgaaggatgccttctttaccatttccctacaccctgattcccaaaacctatttgctttcacctggactgaccctgacaccctccagtcacaacaactcacatggactgtcctccctcagggcttcagggatagccctcatttctttggacaagctctagcccgaaaccttacttccttaaacctgtctcccagtcatcttcaatatgtggacgaccttcttctttgcagcccctctctaaaagactctcaaactcacacggccactgctctcttaaactttctcgctatcaaagggtatagggtctccccctccaaggcccaactctccatctccatgatgacttacttaggaattcaactttcccctggggcccaggctatgactccagccagggcagcattaatagaaaatctacccccaccctcctccaaaagcgaaatcctttccttcccagggctagcaggcttctttagaatatggatttccaactttgccctcctagctcatcccctctatgaagtggccaaaggccctcccaatgaacccctaaacccctcacataacatactccccagcttccacaaactccaaactgctcttgtcactgcgtcagctccgtccttacctgatatctcccaacctttcactctctatactgctgaaagctga

SEQ ID NO: 507 - DNA, 1715 bp, Homo sapiens
  CDS (62)..(493)
cacgccatgtttggcacgagggtgacgtccctgcgcgcgccgctttctgttgccgggcgcaatggcggatacgctggagtcctcgctggaggacccactgcggagctttgtgcgagttttggagaagcgggatggtacagtgctacgactacagcagtatagctccggtggcgtgggttgcgttgtgtgggacgctgccattgtcctttctaaatacctggaaacgcccgagttttctggcgacggggcccacgcgctgagccggcggtcggtgctggagctgggttcgggcaccggggccgtggggctcatggctgctaccctcggggctgatgttgtagtcaccgatcttgaggaattgcaagacttgctgaagatgaatattaatatgaacaagcatcttgtcactggttctgttcaagccaaggggggaagaaatagaaggctttccttctccacccgacttcatactgatggccgactgcatatactatgaagagtctttggagccattgctgaaaactctaaaagatatcagcggatttgaaacttgtattatatgttgttatgaacaacgaacaatggggaaaaatccagaaattgagaaaaaatattttgagaaatttccatcgtgaagcctttaatcatcttacccaaggctctaacaacctgggtaaactaaagatgtgaatagagcatgtgaatacagcatgggaagattgtgttcacagatttttttttccggcacgtccttagagatccgatgtatagatgatgaccaccaggggctgtctgcaatacgaaaaattcctgcttgcctgcctgcctgccaatggccctgaatccagcttaggttacttagttcagcatcaagttcttcttaaatgttgggaatcagttattcaaataaaaattggtattgaggcgaggctgaaatctgccaaaaacagccaacatgatttgactggaccttttacaggaagctagagataaatttctgaagagaactatctgctattatataataatgttttaaattcaaactagtaaattttagtttgtcttcagagtttaaaaggttttcattttgtacataattatacaatatttatcatttgtattttccacttcatttcttttaaaatatctttaatactgaaatgttcttttaattttaaaaagaactgagatattgtcttgtatacttatattggccaaagttttcttttcctccaccatacatatctatgtgatttaatcagtaaattgtactgtaatgagttgctaagaagacaaatcagaagattggaggaacaaaagatatctttacagatttttcatttgagcatggagtgagaatagaaagaccagtttcaggcttatgcacttacgtggctcatgcactttatgtatatgttccaggaaaatctggcttaaaaatactggtattgtttacatgaagcagtgaaaggtttttgaataactacaaatgtagttctatatgtatataccaaatgaatttctgttctgtgtctctctgttttatgttatgaagccattcgctcatatacaataatctgtcaaggactttaatcatacttgttccaaagagtagtaaccggatggaattctggtatttacaggcattggtgctagatggtacattttatgtgttaaaataaacattgtttttgagaccttgaaaaaaaaaaaaa

SEQ ID NO: 508 - DNA, 1116 bp, Homo sapiens
  CDS (217)..(1002)
gcacgggtggattccagcccccagccccagggctctgaatcgctgccagctcagccccctgcccagcctgccccacagcctgagccccagcaggccagagagcccagtcctgaggtgagctgctgtggcctgtggccaggcgaccccagcgctcccagaactgaggctggcagccagccccagcctcagccccaactgcgaggcagagagacaccaatgggaatcccaatggggaagtcgatgctggtgcttctcaccttcttggccttcgcctcgtgctgcattgctgcttaccgccccagtgagaccctgtgcggcggggagctggtggacaccctccagttcgtctgtggggaccgcggcttctacttcagacttccaggcaggcccgcaagccgtgtgagccgtcgcagccgtggcatcgttgaggagtgctgtttccgcagctgtgacctggccctcctggagacgtactgtgctacccccgccaagtccgagagggacgtgtcgacccctccgaccgtgcttccggacaacttccccagataccccgtgggcaagttcttccaatatgacacctggaagcagtccacccagcgcctgcgcaggggcctgcctgccctcctgcggtgcccgccggggtcacgtgctcgccaaggagctcgaggcgttcagggaggccaaacgtcaccgtcccctgattgctctacccacccaagagccccgcccacgggggcggcccccccagagaagagtggccacgcacaatcggagaagtggaggccaaacactgcctgcaaaagttctggcaagccgcggcggccaaccattctctgcagcctcctcctgaaccaacggagcgtttccactcacgggtccactcccggaaatgcttctcgggttccaccgtgccccctggggctttctcctgagcccacgttccccgtgcccacagccttcccgagaaccacggctaacttttctcggccccctccatcgggctgaggaagcacagcagcattttcaaacaagtaccaaatcgattggctttaaacacccttcacataccctcccccccaattatcccccattatccccacacataaaaaaaaaaaa

SEQ ID NO: 509 - DNA, 1697 bp, Homo sapiens
  CDS (252)..(1334)
ggcaggtcagtcaggtacctgggcgctctgttacacaagcaagatacagccagccccacctaattttgtttccctggcaccctcctgctcagtgcgacattgtcacacttaacccatctgttttctctaatgcacgacagattcctttcagacaggacaactgtgatatttcagttcctgattgtaaatacctcctaagcctgaagcttctgttactagccattgtgagcttcagtttcttcatctgcaaaatgggcataatacaatctattcttgccacatcaagggattgttattcctttaaaaaaaaaccaataccaaagaagcctacaatgttggccttagccaaaattctgttgatttcaacgttgttttattcacttctatcggggagccatggaaaagaaaatcaagacataaacacaacacagaacattgcagaagtttttaaaacaatggaaaataaacctatttctttggaaagtgaagcaaacttaaactcagataaagaaaatataaccacctcaaatctcaaggcgagtcattcccctcctttgaatctacccaacaacagccacggaataacagatttctccagtaactcgtcagcagagcattctttgggcagtctaaaacccacatctaccatttccacaagccctcccttgatccatagctttgtttctaaagtgccttggaatgcacctatagcagatgaagatcttttgcccatctcagcacatcccaatgctacacctgctctgtcttcagaaaacttcacttggtctttggtcaatgacaccgtgaaaactcctgataacagttccattacagttagcatcctctcttcagaaccaacttctccatctgtgacccccttgatagtggaaccaagtggatggcttaccacaaacagtgatagcttcactgggtttaccccttatcaagaaaaaacaactctacagcctaccttaaaattcaccaataattcaaaactctttccaaatacgtcagatccccaaaaagaaaatagaaatacaggaatagtattcggggccattttaggtgctattctgggtgtctcattgcttactcttgtgggctacttgttgtgtggaaaaaggaaaacggattcattttcccatcggcgactttatgacgacagaaatgaaccagttctgcgattagacaatgcaccggaaccttatgatgtgagttttgggaattctagctactacaatccaactttgaatgattcagccatgccagaaagtgaagaaaatgcacgtgatggcattcctatggatgacatacctccacttcgtacttctgtatagaactaacagcaaaaaggcgttaaacagcaagtgtcatctacatcctagccttttgacaaattcatctttcaaaaggttacacaaaattactgtcacgtggattttgtcaaggagaatcataaaagcaggagaccagtagcagaaatgtagacaggatgtatcatccaaaggttttctttcttacaatttttggccatcctgaggcatttactaagtagccttaatttgtattttagtagtattttcttagtagaaaatatttgtggaatcagataaaactaaaagatttcaccattacagccctgcctcataactaaataataaaaattattccaccaaaaaattctaaaaaaaaaaaaa

SEQ ID NO: 510 - DNA, 1260 bp, Homo sapiens
  CDS (190)..(585)
aaggatccttaattaaattaatccccccccccccccggtggcccctcccgcccacgcgccagagtcgcagtgggcgggcctacgtgctccgcccgctgtgagcctgtccggcccccgcccgctccggagcaacccgcgagcttacaccggcttctctctgtcctcagcccgcgcgccgccatcgccgtcatgctgggcgccgctctccgccgctgcgctgtggccgcaaccacccgggccgaccctcgaggcctcctgcactccgcccggacccccggccccgccgtggctatccagtcagttcgctgctattcccatgggtcacaggagacagatgaggagtttgatgctcgctgggtaacatacttcaacaagccagatatagatgcctgggaattgcgtaaagggataaacacacttgttacctatgatatggttccagagcccacagttcgtatcctagaggttgttaaggacaaagcaggacctcataaggaaatctacccctatgtcatccaggaacttagaccaactttaaatgaactgggaatctccactccggaggaactgggccttgacaaagtgtaaaccgcatggatgggcttccccaaggatttattgacattgctacttgagtgtgaacagttacctggaaatactgatgataacatattaccttatttgaacaagttttcctttattgagtaccaagccatgtaatggtaacttggactttaataaaagggaaatgagtttgaactgaaaatagggtatttgtttcatgtgttgccattaataagcagaaaattaagtgctgtatgggttccatggttttgctgccctcttacatgctgagagaactgtgttaattctctggaaaccatctgacatgaaaatcagcttcattaatatgtttgggtgccctagcttgtaaattagctgaaggctagaagtcatttatatagaattttcttgttgacaccctaggcttaggggactggttgtctgtggggatagatcaaattgtgtacctttccaaaacaggttttaatgatgtttaaaagtggtcactgagatagtcttgaggatgtgctatgcagtagccaagccctcttacggtgtgttcctctcttagtgcccctttcctttcctacctgttcttcccttgcagtggtgtattagccttggacattaaaacatttgctttgtaaatttggaggcattctgattaaacagctgagtaaaacaaaaaaaaaaaaa

SEQ ID NO: 511 - DNA, 3063 bp, Homo sapiens
  CDS (17)..(2041)
gttttcatagataaccatgacaacatcccatatgaatgggcatgttacagaggaatcagacagcgaagtaaaaaatgttgatcttgcatcaccagaggaacatcagaagcaccgagagatggctgttgactgccctggagatttgggcaccaggatgatgccaatacgtcgaagtgcacagttggagcgtattcggcaacaacaggaggacatgaggcgtaggagagaggaagaagggaaaaagcaagaacttgaccttaattcttccatgagacttaagaaactagcccaaattcctccaaagaccggaatagataaccctatgtttgatacagaggaaggaattgtcttagaaagtcctcattatgctgtgaaaatattagaaatagaagacttgttttcttcacttaaacatatccaacatactttggtagattatcagagccaggaggatatttcactgcttttacaacttgttcaaaataaggatttccagaatgcatttaagatacacaatgccatcacagtacacatgaacaaggccagtcctccatttcctcttatctccaacgcacaagatcttgctcaagaggtacaaactgttttgaagccagttcatcataaggaaggacaagaactaactgctttgctgaatactccacatattcaggcacttttactggcccacgataaggttgctgagcaggaaatgcagctagagcccattacagatgagagagtttatgaaagtattggccagtatggaggagaaactgtaaaaatagttcgtatagaaaaggctcgtgatattccgttgggtgctacagttcgtaatgaaatggactctgtcatcattagccggatagtaaaagggggtgctgcagagaaaagtggtctgttgcatgaaggagatgaagttctagagattaatggcattgaaattcgggggaaagatgtcaatgaggtttttgacttgttgtctgatatgcatggtactttgacttttgtcctgattcccagtcaacagatcaagccgcctcctgccaaggaaacagtaatccatgtaaaagctcattttgactatgacccctcagatgacccttatgttccatgtcgagagttaggtctgtcttttcaaaaaggtgatatacttcatgtgatcagtcaagaagatccaaactggtggcaggcctacagggaaggggacgaagataatcaacctctagccgggcttgttccagggaaaagctttcagcagcaaagggaagccatgaaacaaaccatagaagaagataaggagccagaaaaatcaggaaaactgtggtgtgcaaagaagaataaaaagaagaggaaaaaggttttatataatgccataaaaattgatgattatgacaacgaggagatcttaacctatgaggaaatgtcactttatcatcagccagcaaataggaagagacctatcatcttgattggtccacagaactgtggccagaatgaattgcgtcagaggctcatgaacaaagaaaaggaccgctttgcatctgcagttcctcatacaacccggagtaggcgagaccaagaagtagccggtagagattaccactttgtttcgcggcaagcattcgaggcagacatagcagctggaaagttcattgagcatggtgaatttgagaagaatttgtatggaactagcatagattctgtacggcaagtgatcaactctggcaaaatatgtcttttaagtcttcgtacacagtcattgaagactctccggaattcagatttgaaaccatatattatcttcattgcacccccttcacaagaaagacttcgggcattattggccaaagaaggcaagaatccaaagcctgaagagttgagagaaatcattgagaagacaagagagatggagcagaacaatggccactactttgatacggcaattgtgaattccgatcttgataaagcctatcaggaattgcttaggttaattaacaaacttgatactgaacctcagtgggtaccatccacttggctgaggtgaaagaaacatccattctgtggcatgttggacttgatctggcaaaaactgccaataggaggactgcccgacactgcagcaagattgaggataagatggaaggcagcagtataagctgtagatctgttcttagatctcttgaattagtgagacgacagttcccttaggcagtttgtgcatggcatcctttattctctatacatggctttagcggttcttgcctcattttgggattctaaatggaagctttcaacagagcattccattttgtcctgttaaaaccttttgttttcacctaaaccctttctgcttagttgtatctctgtgaaaaacttgtatacacaagcgtccatgtctcacacaaatattgatgtgattattcttaagtgttaaatcattaacacttaaatgacttcattgggaatattgagcagagggactgtgcttctatgcactgggcaaggcagtatttgcttaggaaactaatttagtcatcagagatactttcctaaaaaggaaaaataaaaaacaaaatggtgccactttgggttgaagctactttgttaggcttgaattcatttatatgtcttttgattcttaaaaaaacaaaaaacattccattagaagcaccagtttttttgctcagactttgtggatcagactctacactcaacacactctaatctacttaaaggtatacaaaatatgctgatcttttttaaattatgatttcctgaatttttttcttaagtcgtctcaactgatttactcacttagcttcccttccctcatcagcatagtataatagaatgtatgttacatttttatgaatggcaggtgttcattataatctgtattgacttaaaaagtttcttcctcatgatgctaatagttttttgtatacatgggaggatagcacatttgacagtttttgcatttttatgtatgagcacagtatcctatgactgtgctacgtatatataggtaataaactggaattctgttgatgaaaaaaaaaaaaa

SEQ ID NO: 512 - DNA, 2382 bp, Homo sapiens
  CDS (78)..(2342)
caggctaggtagcgaggctgggtggttagtctttgggcgaagtgctgcattggtaagaagtgcttgataaagatgacatggtatacatggaagcatatgataacatgttggagtcctggttaactttggttcaagatgacaaacatttccataaaggcttttttacccaacatgcagttcaagttttcaattcctatattcagtgccacctagctgctccagatggcacaagaaatttgactgccaatggtgtggcctctcgtgaggaggaagaaataagtgaacttcaagaggatgatcgagaccagttttctgatcaactggccagtgtaggaatgctaggaagaattgctgcagaacactgtatacctcttctgacaagtttattagaagaaagagtaacaagactccatggtcagttacaacgacatcagcaacagttacttgcttcaccgggttcaagcactgttgacaacaaaatgcttgatgatctctatgaagatattcactggcttattttagttacaggctacctcttagctgatgatactcagggagagactccgctaatacctccagaaataatggaatattccattaagcattcatctgaagttgacattaatacaacacttcaaattttgggatctccaggagaaaaggcttcttccatcccagggtacaacagaacagattctgtgattaggctgttgtctgccattctcagagtttcagaagttgaatctcgagcaataagagcagatctcactcatctactaagtccccagatgggcaaagatattgtttggtttttaaaacgctgggcaaagacttatctcctggtggatgaaaaactgtatgatcagataagtctgccattcagtacagcgttcggagcagatacagagggttctcagtggataattggctacctcttacaaaaagtcatcagtaacctctcagtctggagtagtgagcaggaccttgcaaatgacactgtgcagctccttgtcactttggtggaaagaagagaaagggcaaacttagtaattcaatgtgagaactggtggaatttagctaagcagtttgcaagccgaagcccacctcttaatttcttgtcaagtcctgtgcagaggacattgatgaaggctctagtcttaggaggttttgcacatatggacacagaaaccaaacagcagtattggacagaggttcttcagccacttcagcagcgattcttaagagtgataaaccaagaaaacttccagcagatgtgtcagcaagaggaagtcaagcaggaaatcactgccacactagaggccctgtgtggcattgctgaggctacccagattgacaacgtagcaatcctgtttaattttttaatggacttccttaccaattgcattggattgatggaagtttacaagaataccccagagactgtcaatctcattatagaagtttttgttgaagttgcacataaacagatatgctatcttggagagtccaaagctatgaacttatatgaagcctgccttactttgttgcaagtgtattctaagaataatttagggcggcaaagaatagatgttacagcagaagaagagcaataccaagacctgcttctcattatggaacttcttactaacctgctgtcaaaagaattcatagatttcagtgatacagatgaagtgtttagaggacatgagccaggtcaagcagcaaacagatctgtgtcagcagcggatgttgtgttgtatggagtaaacctaattctgcccttgatgtcacaggatctcttgaagtttccaaccctttgtaatcagtactacaaattaatcacatttatctgtgagatttttcctgaaaaaataccacagcttcctgaggatctgtttaaaagtctgatgtactccctagaattaggaatgacatcaatgagttcggaggtttgccagctttgcctggaggccttgacaccgttagctgaacagtgtgcaaaagcacaagaaacagactcaccactttttctagcaacacggcactttcttaagctggtttttgatatgctggttttgcaaaagcacaacacagagatgaccactgcggctggcgaagctttctacacgttggtgtgtttgcaccaggctgaatattctgaactggtcgaaacattactatcaagtcagcaagacccagttatttaccagagattagcagatgccttcaacaagctcactgcaagcagcactcctcctacgctggatcggaagcagaagatggccttcttaaagagtttagaagaatttatggcaaatgttggtggtctcctttgtgtaaaataaacaacagaactttatgcttaatttaaaaaaaaaaaaa

SEQ ID NO: 513 - DNA, 2847 bp, Homo sapiens
  CDS (521)..(2038)
tacatggaggacatgagcaacattgacctggtggagggcgacgagggcaggatgtgcatcaacacagagtggggggccttcggggacgacggggccctggaggacattcgcactgagttcgacagggagctggacctcggctctctcaacccaggaaagcaactgttcgagaagatgatcagtggcctgtacctgggggagcttgtcaggcttatcttgctgaagatggccaaggctggcctcctgtttggtggtgagaaatcttcagctctccacactaagggcaagatcgaaacacggcacgtggctgccatggagaagtaaagaaggccttgctaatacaagagagatcctggtggacctgggtctggaaccgtctgaggctgactgcattgccgtccagcatgtctgtaccatcgtctccttccgctcggccaatctctgtgcagcagctctggcggccatcctgacacgcctccgggagaacaagaaggtggaacggctccggaccacagtgggcatggacggcaccctctacaagatacaccctcagtacccaaaacgcctgcacaaggtggtgaggaaactggtcccaagctgtgatgtccgcttcctcctgtcagagagtggcagcaccaagggggccgccatggtgaccgcggtggcctcccgcgtgcaggcccagcggaagcagatcgacagggtgctggctttgttccagctgacccgagagcagctcgtggacgtgcaggccaagatgcgggctgagctggagtatgggctgaagaagaagagccacgggctggccacggtcaggatgctgcccacctacgtctgcgggctgccggacggcacagagaaaggaaagtttctcgccctggatcttgggggaaccaacttccgggtcctcctggtgaagatcagaagtggacggaggtcagtgcgaatgtacaacaagatcttcgccatccccctggagatcatgcagggcactggtgaggagctctttgatcacattgtgcagtgcatcgccgacttcctggactacatgggcctcaagggagcctccctacctttgggcttcacattctcatttccctgcaggcagatgagcattgacaagggaacactcatagggtggaccaaaggtttcaaggccactgactgtgaaggggaggacgtggtggacatgctcagggaagccatcaagaggagaaacgagtttgacctggacattgttgcagtcgtgaatgatacagtggggaccatgatgacctgtggctatgaagatcctaattgtgagattggcctgattgcaggaacaggcagcaacatgtgctacatggaggacatgaggaacatcgagatggtggaggggggtgaagggaagatgtgcatcaatacagagtggggaggatttggagacaatggctgcatagatgacatccggacccgatacgacacggaggtggatgaggggtccttgaatcctggcaagcagagatacgagaaaatgaccagtgggatgtacttgggggagattgtgcggcagatcctgatcgacctgaccaagcagggtctcctcttccgagggcagatttcagagcgtctccggaccaggggcatcttcgaaaccaagttcctgtcccagatcgaaagcgatcggctggcccttctccaggtcaggaggattctgcagcagctgggcctggacagcacgtgtgaggacagcatcgtggtgaaggaggtgtgcggagccgtgtcccggcgggcggcccagctctgcggtgctggcctggccgctatagtggaaaaaaggagagaagaccaggggctagagcacctgaggatcactgtgggtgtggacggcaccctgtacaagctgcaccctcacttttctagaatattgcaggaaactgtgaaggaactagcccctcgatgtgatgtgacattcatgctgtcagaagatggcagtggaaaaggggcagcactgatcactgctgtggccaagaggttacagcaggcacagaaggagaactaggaacccctgggattggacctgatgcatcttggatactgaacagcttttcctctggcagatcagttggtcagagagcaatgggcaccctcctggctgacctcaccttctggatggccgaaagagaaccccaggttctcgggtactcttagtatcttgtactggatttgcagtgacattacatgacatctctatttggtatatttgggccaaaatgggccaacttatgaaatcaaagtgtctgtcctgagagatcccctttcaacacattgttcaggtgaggcttgagctgtcaattctctatggctttcagtcttgtggctgcgggacttggaaatatatagaatctgcccatgtggctggcaggctgtttccccattgggatgcttaagccatctcttataggggattggaccctgtacttgtggatgaacattggagagcaagaggaactcacgttatgaactagggggatctcatctaacttgtccttaacttgccatgttgacttcaaacctgttaagagaacaaagactttgaagtatccagccccagggtgcagagaggttgattgccagggagcactgcaggaatcattgcatgcttaaagcgagttatgtcagcaccctgtaggattttgttccttattaagtgtgtgccatgtggtggggtgctgtctggggcatctgtttttcattttgcctgtggtttgtgttgcaggtgttgatagttgttttaaggattgttaggtataggaaatccagtaaattaataaaaaaattttgattttccaataaaaaaaaaaaaaa

SEQ ID NO: 514 - DNA, 593 bp, Homo sapiens
  CDS (70)..(513)
cgctcttcctcgtttgcccctcgtgttcatgggagctcgttttcttttcctctaggcagagaagaggcgatggcggcgatggcatctctcggcgccctggcgctgctcctgctgtccagcctctcccgctgctcagccgaggcctgcctggagccccagatcaccccttcctactacaccacttctgacgctgtcatttccactgagaccgtcttcattgtggagatctccctgacatgcaagaacagggtccaggtgtcctggagcctggaccacaagagcgcccacgcaggcacctatgaggttagattcttcgacgaggagtcctacagcctcctcaggaaggctcagaggaataacgaggacatttccatcatcccgcctctgtttacagtcagcgtggaccatcggggcacttggaacgggccctgggtgtccactgaggtgctggctgcggcgatcggccttgtgatctactacttggccttcagtgcgaagagccacatccaggcctgagggcggcaccccagccctgcccttgcttccttcaataaacatcacaggacctgggactgcacaggaaaaaaaaaaaa

SEQ ID NO: 515 - DNA, 1560 bp, Homo sapiens
  CDS (77)..(1267)
gcggtggcattcgaggaggtggcggtggtggccctcgcctgtggcccccgtgctgcttgcactcgaactcgtcgccatggaggagctccaggagcctctgagaggacagctccggctctgcttcacgcaagctgcccggactagcctcttactgctcaggctcaacgacgctgccctgcgggcgctgcaagagtgtcagcggcaacaggtacggccggtgattgctttccaaggccaccgagggtatctgagactcccaggccctggttggtcctgcctcttctccttcatagtgtcccagtgttgtcaggagggcgctggtggtagcttggaccttgtgtgccaacgcttcctcaggtctgggcctaacagcctccactgcctgggctcactcagggagcgcctcattatttgggcagccatggattctatcccagccccatcatcagttcagggacacaacctgactgaagatgccagacatcctgagagttggcagaacacaggaggctattctgaaggagatgcagtatcacagccacagatggcactagaggaggtgtcagtgtcagatccactggcaagcaaccaaggacagtcactcccaggatcctcaagggagcacatggcacagtgggaagtgagaagccagacccatgttccaaacagagaacctgttcaggcactgccttcctctgccagccggaaacgtctggacaagaaacgttcagtgcctgtagccactgtagaactggaagaaaagaggttcagaactctgcctttagtgccaagccccctacaaggcctgaccaatcaggatttacaagagggagaagattgggagcaagaagatgaggacatggaccccagattagaacacagttcctcagttcaagaagattctgaatccccaagtcctgaagatataccagactacctcctgcaatacagggccatccacagtgcagaacagcaacatgcctatgagcaggactttgagacagattatgctgaataccgcatcctgcatgcccgtgttgggactgcaagccaaaggttcatagagctgggagcagagattaaaagagttcggcgaggaactccagaatacaaggtcctggaagacaagataatccaggaatataaaaagttcaggaagcagtacccaagttacagagaagaaaagcgtcgctgtgagtaccttcaccagaaattgtcccacattaaaggtctcatcctggagtttgaggaaaagaacaggggcagctgaagttatcaagggaatttttgagcctctgcttagtgaaacacaaaggaacaaagcagctataaactaaatagaatgcaactatctgcttttcttatgctgaccactggagtccatggtggcaagtagagagctgctctaggttcttgaggtttggttttcattattaatttttagggtatgggcactgtgcaaagactccatagctgtgcctaggagtctaggaaaagtgacagaggcttggcttttttacctttagttcagccaagtcattttcaagtcctgagaaatga

SEQ ID NO: 516 - DNA, 917 bp, Homo sapiens
  CDS (53)..(823)
gaggagccggccgggcacggaggggcagagaccccggagccccagccccaccatgaccctcggccgccgactcgcgtgtcttttcctcgcctgtgtcctgccggccttgctgctggggggcaccgcgctggcctcggagattgtggggggccggcgagcgcggccccacgcgtggcccttcatggtgtccctgcagctgcgcggaggccacttctgcggcgccaccctgattgcgcccaacttcgtcatgtcggccgcgcactgcgtggcgaatgtaaacgtccgcgcggtgcgggtggtcctgggagcccataacctctcgcggcgggagcccacccggcaggtgttcgccgtgcagcgcatcttcgaaaacggctacgaccccgtaaacttgctcaacgacatcgtgattctccagctcaacgggtcggccaccatcaacgccaacgtgcaggtggcccagctgccggctcagggacgccgcctgggcaacggggtgcagtgcctggccatgggctggggccttctgggcaggaaccgtgggatcgccagcgtcctgcaggagctcaacgtgacggtggtgacgtccctctgccgtcgcagcaacgtctgcactctcggggactccggcagccccttggtctgcaacgggctaatccacggaattgcctccttcgtccggggaggctgcgcctcagggctctaccccgatgcctttgccccggtggcacagtttgtaaactggatcgactctatcatccaacgctccgaggacaacccctgtccccacccccgggacccggacccggccagcaggacccactgagaagggctgcccgggtcacctcagctgcccacacccacactctccagcatctggcacaataaacattctctgttttgtaaaaaaaaaaaaa

SEQ ID NO: 517 - DNA, 3034 bp, Homo sapiens
  CDS (729)..(917)
tagtgttgggtcacctcactatatgtctttaagaacattaaaactatggaaaatttgtctagcatatcagaagttgtaaatgctatatctggtatccagaggctggctgtaaaaagttccttggggtcactctatctcacattttttttggttagcattttaaaaatgcaaagccacatactttgaaatatattattccaaattgagctcccttccctttgcacatattttttcctccccttattgaagtcagctctaaccccaaattctagtatccaaaagtatttttatttgtataatgctatctgaaaaatgtgtttatattatattttcagagctgcaattcttattcgccatttcaatacctagagatagagagtcttgtatttgaagccacacacactggtgtaatatgcttagtactctaggtcaaggatttgttggtaaatggaacattttagcatagtcatgatttttggttgcctagacatcaggtaaacattcagtacactaaagaaactatcctggacactccctcctgcttccaccaatttttttctcacccccttttcaaaaattgaaaactctatgagtgtctttttgagaccataaagcagactttagtaactttctatttctgtaagtactaaatgtctggcattttaaacttttgtagaatacattatgttggacactggaataatactatttattttcacctgtgaaaaatgacttcattgtacttgaaacacctcctttgcatttctccatttgtgccattcactagtggaaataaattgtattataccatgatctactggctttttaaaactgtattaaatatgcacatttttggtatagctattatcatttgtatgtatatattgtatatacatatgagtgtctgtatgtgtgtatagatggatggatgtaactcatactgtacatttccatcagggcacttaaaagttctgttatttttgtttggttttgttatttcagtcctcagttaaggcaagaatgcatgtgtttcttaagaatgagtactctgcgttgatgtttatgagaaggtggtcattagatgcagtcttttcctttttaatcccctcttagcacttctgtgagtggagaggacattaagtaaaatttggaatcataagttgcaatgcagtaaaatggtgctggggaaggagccagttagtgtttctgtgagtttgtgttgtgatgcaataagagataagtaatgcagagagaaatgaaccatggaaagtaagaacactgatggtgattcctctgcaaagatgataagaaaaagaaccaataaatcacacaatctttatgtgctttctatatgtatttcttagtagtgataccattgatcctcttactttttttactccattaatactaataattatatactttgctgaggatcaaaacagccaagaaaggaattactgctaaagcatctaagattctcctgaactgtaaaatcaacaggaaatggccactgggagagaaggatttggtattgggtgaggggctttctccctttacctgcctcttcttgcttgctaatagtaagttctttgtgcaccttccaccacttctgagccactactattcaagtagagatttgccccaacacattaactttttccttggagatttatatggtcctgcattttgtcctgtgctcacaatgtgaagtgtcttctgtattcaaatcaaaaaataatatatttaaggtatataagtgtgaatctcctataatgatggaagaagaggttctcttgtcttagatagaaaagagccttctccaagagcaatgtcaaaacttgggctgtcatctttgagctgtttaccaaaatacagaccattattgaagaaaaacaaattatctattttgttttcccccatctaacatgatagtgcccccaaccaggttgtagcattgccttttaaaagagactcactcactcttagtttttaagaactggaaatttcccatcctcagatcccttaaaggatgaagagttggctgtacacttagcggacttgcctcttgtatgcaaggactactgattgaagtctgttttgctgtgtctggttatgttgtctgcacttttatgaaatcactacaataggtctgcattggaaatgactattaatttgtaaagaagtaagttttattaaacactgtctagaaaaagaaagtgaagctgagaactcttcctttattgtgcatttatattttctgctgaattccggtagttccctttaaagtcatgttgactaatgttttcctccttgtttgtattcagatttccaaaatttcactcatacaagggaagagactccatttagcttaacggtagtctttagatcataagaaatatataaattagtatgcaccttatctgcctgttgtgggtttcttaaacttgcacttcctacccacccaaagatagatatcctttaaagaaaataaaggcagagaattaaaactggggagccatttactatgtcaccatcactgttaactgtttcccagcaatctaaactttttgaagtttcagaggtgtattttttttttgtatatatgtctgtgtgattgtattgttttgtttctaaatatacaaggaattctttaaatagagaaaaaggttaatcctcactgaaacaccaggatgcccactggatatactaatctgaacatctgtaggtagtttgtcatgaaaaagtggagagaagatgagacttttgaatgaatgaaaaagggtatcttgattcccaagaattcccccaaaagttcgggtcattcaacctgcacagcgttctttcactctaaagcgtcagcacttgtgagtgaaaaatcatgtaattatctcgtaatattgagcctaaccacatcgaccctacgttcctgtatttttctcggctttggtcccttaagtttatataggccttggccacccttgagaaggaagttcctgtcattaacccaggtgctggtctcagcagttatatcttg

SEQ ID NO: 518 - DNA, 3024 bp, Homo sapiens
  CDS (240)..(2861)
gcgggggccgaagcaccgcctacgtcgggctgcgtgacaatggggccggcggcagaacgcagctgcggcgactgcgggtctcgtgggggcggagcggtcgccgctgccgccgcagctcgggtcgggatttgaaagattagaaacttcgggtggagagggcggcggcgttgaatgtgtggcggaagcgctgggggtcacggctccgcgcgccgccggacagccggcggcgtctccacagcatgaattacccgggccgcgggtccccacggagccccgagcataacggccgaggcggcggcggcggcgcctgggagctgggctcagacgcgaggccagcgttcggcggcggcgtctgccgcctcgagcacctgcccggcggggacccggacgacggcgacgtgcccctggccctgctgcgcggggaacccgggctgcatttggcgccgggcaccgacgaccacaaccaccacctcgcgctggacccctgcctcagtgacgagaactatgactttagctccgccgagtcgggctcctcgctgcgctactacagcgagggtgagagcggcggcggcggcggcggcagctccttgtcgctgcatccgccgcagcagcctccgctggtcccgacgaactcggggggcggcggcgcgacaggagggtcccccggggaaaggaaacgtacccggcttggcggcccggcggcccggcaccgctatgaggtagtgacggagctgggcccggaggaggtacgctggttctacaaggaggacaagaagacctggaagcccttcatcggctacgactcgctccgcatcgagctcgccttccggaccctgctgcagaccacgggtgcccggccccagggcggggaccgggacggcgaccatgtgtgctcccccacgggcccagcctccagttccggagaagatgacgatgaggaccgcgcctgcggcttctgccagagtacgacggggcacgagccggagatggtggagcttgtgaacatcgagcctgtgtgcgtgcggggcggcctctacgaggtggatgtgacccaaggagagtgctacccggtgtactggaaccaggctgataaaataccagtaatgcgtggacagtggtttattgacggcacttggcagcctctagaagaggaagaaagtaatttaattgagcaagaacatctcaattgttttaggggccagcagatgcaggaaaatttcgatattgaagtgtcaaaatccatagatggaaaagatgctgttcatagtttcaagttgagtcgaaaccatgtggactggcacagtgtggatgaagtatatctttatagtgatgcaacaacatctaaaattgcaagaacagttacccaaaaactgggattttctaaagcatcaagtagtggtaccagacttcatagaggttatgtagaagaagccacattagaagacaagccatcacagactacccatattgtatttgttgtgcatggcattgggcagaaaatggaccaaggaagaattatcaaaaatacagctatgatgagagaagctgcaagaaaaatagaagaaaggcatttttccaaccatgcaacacatgttgaatttctgcctgttgagtggcggtcaaaacttactcttgatggagacactgttgattccattactcctgacaaagtacgaggtttaagggatatgctgaacagcagtgcaatggacataatgtattatactagtccactttatagagatgaactagttaaaggccttcagcaagagctgaatcgattgtattcccttttctgttctcggaatccagactttgaagaaaaagggggtaaagtctcaatagtatcacattccttgggatgtgtaattacttatgacataatgactggctggaatccagttcggctgtatgaacagttgctgcaaaaggaagaagagttgcctgatgaacgatggatgagctatgaagaacgacatcttcttgatgaactctatataacaaaacgacggctgaaggaaatagaagaacggcttcacggattgaaagcatcatctatgacacaaacacctgccttaaaatttaaggttgagaatttcttctgtatgggatccccattagcagttttcttggcgttgcgtggcatccgcccaggaaatactggaagtcaagaccatattttgcctagagagatttgtaaccggttactaaatatttttcatcctacagatccagtggcttatagattagaaccattaatactgaaacactacagcaacatttcacctgtccagatccactggtacaatacttcaaatcctttaccttatgaacatatgaagccaagctttctcaacccagctaaagaacctacctcagtttcagagaatgaaggcatttcaaccataccaagccctgtgacctcaccagttttgtcccgccgacactatggagaatctataacaaatataggcaaagcaagcatattaggggctgctagcattggaaagggacttggaggaatgttgttctcaagatttggacgttcatctacaacacagtcatctgaaacatcaaaagactcaatggaagatgagaagaagccagttgcctcaccttctgctaccaccgtagggacacagacccttccacatagcagttctggcttcctcgattctgcattggagttggatcacaggattgattttgaactcagagaaggccttgtggagagccgctattggtcagctgtcacgtcgcatactgcctattggtcatccttggatgttgccctttttcttttaaccttcatgtataaacatgagcacgatgatgatgcaaaacccaatttagatccaatctgaactcttgaaggacatgaatggcctaaaactgatttttttttttttccgttaaaatgtgtgtgtcaagatacggagatttcagggttaaagtatatttcagttttctttagggcaacatatatttgaatttaaaagcactttatttaaaaaaaaaaaaaaa

SEQ ID NO: 519 - DNA, 4836 bp, Homo sapiens
  CDS (15)..(1490)
ggggtcggcggaagatggcggccggcgaaaggagctggtgcctgtgcaagttgttgaggtttttttattcattattcttccctgggctcattgtatgtggaactttatgtgtgtgtttggtcattgtcctttggggaatcagactgctgctacagagaaagaaaaaattagtgtcaactagcaaaaatgggaaaaatcaaatggtgattgcattttttcatccatactgcaatgctggtggaggaggagaaagagttttatggtgtgctttaagagccctgcagaaaaagtatcctgaagcagtttatgttgtttataccggcgatgttaatgtcaacggtcaacagatactagaaggtgctttcagaagatttaacatcagattaattcacccagtgcagtttgtttttttaaggaaacgctatcttgtggaagattcactgtatcctcacttcacactgctgggccaaagtctaggatccatttttcttggctgggaagctctaatgcagtgtgttcctgatgtttacattgattcaatgggatacgcttttacgcttcctctgtttaagtatatagggggttgccaagttggaagctatgttcattatcctactatcagcaccgacatgctctctgtagtgaagaatcaaaatattggatttaataatgcagccttcattaccaggaatccttttctcagcaaagtaaagctcatctactactatttatttgcttttatttatggacttgttggttcttgcagtgatgtagtcatggtcaattcttcttggacactaaaccatattctctcactatggaaagttgggaattgcactaacattgtttatccaccttgtgatgtgcagacatttctggacattcccttacatgagaaaaagatgaccccaggacatttgctggtttctgttggccagtttaggccggaaaagaatcatccattgcagatcagagcctttgctaaattgctgaataagaagatggttgagtcacctccttcgcttaaacttgtcctcattggaggttgtcgtaacaaagatgatgaacttagggtaaaccaactgagaaggctgtctgaggatttaggagttcaagaatatgtggaatttaaaataaacattccatttgatgaattaaagaattatttgtctgaagcaacaattggtctgcataccatgtggaacgagcattttgggattggagttgtggagtgtatggcagctggcacaattatccttgcacacaattcggggggcccaaagcttgacattgtggttcctcacgaaggagatataactggctttctggctgagagtgaagaagactatgctgaaactatcgctcacattctttccatgtctgcagaaaagagactccaaatcagaaaaagtgctcgtgcatctgtaagcagattctctgatcaggaatttgaagtgacattcctatcatctgtggaaaagttatttaagtaatgccatatctgtaaaattaaagatattttatataaactggttaaacaccttcatatgtaaatatttttctaaattcaatctcatttgtcaaatcattttactttagaaaacagacaaaatttccttttagaataaaaggaagtgttgaaaaaaaaatggatgactagccttcggcttccattcttggtatacatgagagaggctggctgctgagatgaatgtgaaccaggttgcagagaatctggctttgagccaccaggaagaactagtggatttgccaaaaaactaccccttgagtgaaaatgaagatgagggggacagtgatggagagagaaagcatcaaaagcttctggaagcaatcatttcccttgatggaaagaataggcggaaattggctgagaggtctgaggctagtctgaaagtgtcagagttcagtgtcagttctgaaggatcaggagaaaagctgggccttgcagatctgcttgagcccgttaaaacttcatcttctttggccactgtaaaaaagcaactgaatagagtcaaatcaaagaaggtggtggagttacctcttaacaaagaaaaaattgaacagatccacagagaagtagcattcagtaaaacctcacaggtcctctccaaatgggaccctatcatcctgaagaaccagcaggcagagcagctggtttttcccctggggaaggagcagccagccattgctcccattgaacatgcgctcagtggctggaaggcaagaactcccctggagcaggaaatttttaacctcctccataagaacaagcagccagtgacagatcctttactgactcccatggaaaaggcctctctccaagccatgagcctggaagaggcaaagatgcaccgagcagagcttcagagggctcgggctctgcagtcctactatgaggccaaggctcgaaaagagaagaaaatcaaaagtaaaaagtatcacaaagtcgtgaagaaaggaaaggccaagaaagccttaaaagagtttgagcagctacagaaggttaatccaactgtggcactggaagaaatggaaaaaattgaaaatgccagaatgatggaaagaatgagccttaagcaccaaaacagtgggaaatgggccaagtcaaaggcaattatggccaaatatgacctggaggctcgccaagctatgcaggaacagttggccaagaacaaagaactgacacagaaactccaggtagcctctgagagtgaggaagaggagggaggcacagaagtggaagaactccttgtccctcatgtagcgaatgaagtgcagatgaatgtggacggaccgaatccctggatgttcaggagctgcaccagtgacaccaaagaggctgcaacacaggaggaccctgagcaagtgccagagcttgcagctcatgaggtttctgcaagtgaggcagaagaaagaccagtggcagaggaagaaattttgttgagagaatttgaggaaaggcaatcccttagaaaaagatctgagctcaaccaggatgctgagccagcaagcagtcaagaaacaaaagattctagcagccaggaggtgctgtccgaattgagggcactatctcagaaattgaaggaaaaacatcagtccaggaagcaaaaagcaagttcagaggggactgttccccaggtccagagagaggaacctgccccagaagaagcggaacccctattgctacagaggtcagagagagtacaaactctggaagagctagaagagctgggaaaagaagattgttttcaaaataaggagcttcccagacctgtgttagaaggacagcagtcagagaggaccccaaataatcggcctgatgcccctaaggagaagaaagagaaggagcaactgatcaacctacagaacttcctgaccacacagtctccttccgtgaggtctttggcagttcccacaataatagaggagctggaagatgaagaggagagagaccaaaggcagatgataaaggaagcttttgctggggatgatgtcatcagagatttcttgaaagagaagagggaagctgtggaggcgagtaagccaaaggacgtggacctgacactacctggctggggcgagtggggtggtgtgggcctaaagcccagtgccaagaaaagacgccagtttctcattaaagcccctgagggtcctccaagaaaagataagaatttgccaaatgtgattatcagtgagaagcgcaacatccacgcagcagctcatcaggtacaagtgcttccatatccatttacccaccatcggcaatttgaaaggaccatccagacccctataggatccacatggaacacccagagggctttccaaaagctgactactcccaaggtcgtcaccaagccaggccatatcattaagcccataaaagcagaggatgtgggctaccagtcttcctcaaggtcagacctgcctgtcatacagaggaatccaaaacgaatcaccacacgtcacaataaagaagaaaaactgtaggttgtgtagctggagaagtgacagtcaggggccctgattccacttcctttggtccagttttactctgctacagggtggattccaaaactggctcagcacattgcatgtagttgagccacattttttaaaaaaagaaaatggatgaccattaattgactagcattttagaattgatcagacattagaacacagaaaaattctagtacatttaaattctaaacaatacagtggatgacccttttgaatatacctaatgatttccttaaaaaagaaattttaaacagacttgtttaatcgtgttctcaaagcatacagtcaagaggtgggactgactgatgctttataggtgtgtgtagggtggtagaggccaaggtgctgccagcaatcctttccatactaggtactggtgaaaattgtttttgtttatgctgtcagcacatttgtgtgggtctctcattgtcccttaacagtgccgcatctcagcctggaagtcagctttaagtcattcaagagaacctcaggctgtttttctgacagtgatgatatgatatacagatacatccacagggtatctattaccagcataatgcattgtaagatggcaaggtggcattttgaaagagcgctgggcaagcagttagcacatctgggcctaccttcagcttcttcatttacaaacttctgaccttttgacactaaagctgctcctttatctttctgagtctcagattcttcatctgtaatctggagttgttaattccagtccttactaccttttagagttggaatgagatggaaagtagatgaaactactttgaaaattacgac

SEQ ID NO: 520 - DNA, 1917 bp, Homo sapiens
  CDS (80)..(628)
  misc_feature (1)...(1917): n = a,t,c or g
aaggcagcggggcggcggcggcggcggcggcggctgtggaggccgcagtccgggtcctggcttcggcctcagccccaccatggtgacgcttgctgaactgctggtgctcctggccgctctcctggccacggtctcgggctatttcgttagcatcgacgcccatgctgaagagtgcttctttgagcgggtcacctcgggcaccaagatgggcctcatcttcgaggtggcggagggcggcttcctggacatcgacgtggagattacaggaccagataacaaaggaatttacaaaggagacagagaatccagtgggaaatacacatttgctgctcacatggatggaacatacaaattttgttttagtaaccggatgtccaccatgactccaaaaatagtgatgttcaccattgatattggggaggctcccaatgagctagcagtggcgatgacagctgtaaagcacgaacaggaatacatggaagtccgggagagaatacacagagccatcaacgacaacacaaacagcagagtggtcctttggtccttctttgaagctcttgttctagttgccatgacattgggacagatctactacctgaagagattttttgaagtccggagagttgtttaaaaagcctcttcctgatgatcccaactcagaattcactgtttaccaaacaccttggtcataataatgtcattagtttctccatttttattttctgaactgtacattcacaacttatgtttctttgagattaatagatattgggggaaaaacgcctttttaggaaaattatagtgaaaatttgacagttgattggcataatttcttgtttgaatgctgcctccattatataggtccttccaggaactcaaacactgtaagtgaaatatgggagtatagtttttattatttcttcttttccttttgttttcataatataatgcagtttgttcaggaaatcagcacaaagcctgatagtactttactaaaatgactgcattctttggattccttcagtctatggttcaagtcactaaagattcatttttgttgagtccttatgagaaacagcagtatgaatcttgacggtttctgcccgtcctaatggcagagctctctgacttgggtgtatgctgccaggctgggtactttcatactttgttttcttgttttgctttaaaactacgactcagcatacattttcccacatacatttttacattgtaccttaggactcagtcatctccacttaaattgatgacacaagcagctaataaccatttctgggtttctgcctaaccccctaattgtctgttaaagccaattctctgggtgtcccagtgagtggtggctttttttctttccacattggcacattcacttctcccactcttgggcatgtaagaaataagcatttacataattggaaaaatctggatttctgatgccaaagggttaaagcttcttggatttcatttcattgatatacagccactattttatttttgatcagtggcctttggggccacctgttcagggtactgaccatcagtgtcagcattagggttttggtttttggttcttttgggtatttccttttgggccatgtgattcttgtttgtggtacaatggaagttacttcctcttggtcctcgatgatggggtttaaactaaaggagcattcggntttggcattgggatagaaccggatagtgtggcagtgtcaatttagtacgagtgcaatttttttgggatttgcggggcacaccaagaggttttattatattatgttggaggtttgtggaaacattccggtgggaaagattatagagtgcactaaagtgctgtgttggacacaaaaataaagtgacacgggaaataagagagagggactgtgattgctagggata

SEQ ID NO: 521 - DNA, 1992 bp, Homo sapiens
  CDS (80)..(703)
  misc_feature (1)...(1992): n = a,t,c or g
aaggcagcggggcggcggcggcggcggcggcggctgtggaggccgcagtccgggtcctggcttcggcctcagccccaccatggtgacgcttgctgaactgctggtgctcctggccgctctcctggccacggtctcgggctatttcgttagcatcgacgcccatgctgaagagtgcttctttgagcgggtcacctcgggcaccaagatgggcctcatcttcgaggtggcggagggcggcttcctggacatcgacgtggagattacaggaccagataacaaaggaatttacaaaggagacagagaatccagtgggaaatacacatttgctgctcacatggatggaacatacaaattttgttttagtaaccggatgtccaccatgactccaaaaatagtgatgttcaccattgatattggggaggctccaaaaggacaagatatggaaacagaaggtggtggagatacctgggatgctcaccagaacaagctagaagaaatgatcaatgagctagcagtggcgatgacagctgtaaagcacgaacaggaatacatggaagtccgggagagaatacacagagccatcaacgacaacacaaacagcagagtggtcctttggtccttctttgaagctcttgttctagttgccatgacattgggacagatctactacctgaagagattttttgaagtccggagagttgtttaaaaagcctcttcctgatgatcccaactcagaattcactgtttaccaaacaccttggtcataataatgtcattagtttctccatttttattttctgaactgtacattcacaacttatgtttctttgagattaatagatattgggggaaaaacgcctttttaggaaaattatagtgaaaatttgacagttgattggcataatttcttgtttgaatgctgcctccattatataggtccttccaggaactcaaacactgtaagtgaaatatgggagtatagtttttattatttcttcttttccttttgttttcataatataatgcagtttgttcaggaaatcagcacaaagcctgatagtactttactaaaatgactgcattctttggattccttcagtctatggttcaagtcactaaagattcatttttgttgagtccttatgagaaacagcagtatgaatcttgacggtttctgcccgtcctaatggcagagctctctgacttgggtgtatgctgccaggctgggtactttcatactttgttttcttgttttgctttaaaactacgactcagcatacattttcccacatacatttttacattgtaccttaggactcagtcatctccacttaaattgatgacacaagcagctaataaccatttctgggtttctgcctaaccccctaattgtctgttaaagccaattctctgggtgtcccagtgagtggtggctttttttctttccacattggcacattcacttctcccactcttgggcatgtaagaaataagcatttacataattggaaaaatctggatttctgatgccaaagggttaaagcttcttggatttcatttcattgatatacagccactattttatttttgatcagtggcctttggggccacctgttcagggtactgaccatcagtgtcagcattagggttttggtttttggttcttttgggtatttccttttgggccatgtgattcttgtttgtggtacaatggaagttacttcctcttggtcctcgatgatggggtttaaactaaaggagcattcggntttggcattgggatagaaccggatagtgtggcagtgtcaatttagtacgagtgcaatttttttgggatttgcggggcacaccaagaggttttattatattatgttggaggtttgtggaaacattccggtgggaaagattatagagtgcactaaagtgctgtgttggacacaaaaataaagtgacacgggaaataagagagagggactgtgattgctagggata

SEQ ID NO: 522 - DNA, 1220 bp, Homo sapiens
  CDS (370)..(1140)
taccgccaccgccgccgccgattccggagccggggtagtcgccgccgccgccgccgccgctgcagccactgcaggcaccgctgccgccgcctgagtagtgtaccgccaccgccgccgccgattccggagccggggtagtcgccgccgccgccgccgctgcagccactgcaggcaccgctgccgccgcctgagtagtgggcttaggaaggaagaggtcatctcgctcggagcttcgctcggaagggtctttgttccctgcagccctcccacggcagagtctccagagatttgggccgctacaaaaagtgcattttgcccattcggctgtggatagagaagcaggaagagcactggacttggagtcagggaatgacaatggataaaagtgagctggtacagaaagccaaactcgctgagcaggctgagcgctatgatgatatggctgcagccatgaaggcagtcacagaacaggggcatgaactctccaacgaagagagaaatctgctctctgttgcctacaagaatgtggtaggcgcccgccgctcttcctggcgtgtcatctccagcattgagcagaaaacagagaggaatgagaagaagcagcagatgggcaaagagtaccgtgagaagatagaggcagaactgcaggacatctgcaatgatgttctggagctgttggacaaatatcttattcccaatgctacacaaccagaaagtaaggtgttctacttgaaaatgaaaggagattattttaggtatctttctgaagtggcatctggagacaacaaacaaaccactgtgtcgaactcccagcaggcttaccaggaagcatttgaaattagtaagaaagaaatgcagcctacacacccaattcgtcttggtctggcactaaatttctcagtcttttactatgagattctaaactctcctgaaaaggcctgtagcctggcaaaaacggcatttgatgaagcaattgctgaattggatacgctgaatgaagagtcttataaagacagcactctgatcatgcagttacttagggacaatctcactctgatcatgcagttacttagggacaatctcactctgtggacatcggaaaaccagggagacgaaggagacgctggggagggagagaactaatgtttctcgtgctttgtgatctgttcagtgtcactctgtaccctcaacatatatcccttgtgcgataaaaaaaaaaa

SEQ ID NO: 523 - DNA, 2401 bp, Homo sapiens
  CDS (170)..(2116)
aaagcaacagattctagaactggagaagaaagtaaatgaagcaaagagaactcagcaagaatattatgaaagggaacttaaaaacctgcaaagtagattggaagaggaggtgactcaattaaacgaggcccattctaagactttggaagaattagcttggaagcaccatatggcaattgaagctgtccacagtaatgcaattagggataagaaaaaactgcaaatggatttggaagaacaacataacaaagataaactaaacctggaagaggataaaaatcagcttcaacaagagctagaaaacctaaaggaagtactggaagacaagttgaatacagccaatcaagagattggccacctccaagatatggtaaggaaaagtgaacaaggtcttggctctgcagaaggacttattgctagtcttcaggactcccaggaaaggcttcagaatgagcttgacttgactaaagacagcctaaaggagaccaaggatgctctattaaatgtggagggtgagctagaacaagaaaggcaacagcatgaagaaacaattgctgccatgaaagaagaagagaagctcaaagtggacaaaatggcccatgacttagaaattaagtggactgaaaatcttagacaagagtgttctaaacttcgtgaagagttaaggcttcaacatgaagaggataagaagtcagcaatgtctcaacttttgcagttgaaagatcgagagaaaaatgcagcaagagattcatggcagaagaaagtagaagatctcttaaaccagatttccttgctgaaacagaatctggagatacagctttcccagtctcagacttctttgcaacaactgcaagcccagtttacgcaagaacgacagcggcttacgcaagagcttgaagaattagaggagcaacatcagcaaagacacaaatcattaaaagaagcacatgtccttgcatttcaaactatggaagaggaaaaggaaaaggagcaaagagctcttgaaaatcatttacaacagaagcattctgcagagcttcaatcactaaaagatgcacacagagagtcaatggagggcttccggatagaaatggaacaggaacttcagactcttcggtttgaattagaagatgaaggaaaggctatgcttgcttccttgcgctcagaactcaaccatcaacatgcagctgcaattgatttgttacggcataatcatcatcaagaattggcagctgctaaaatggaattagagagaagcatagacatcagcagaagacagagtaaggagcacatatgtagaattacagatctacaagaggaattaagacacagagagcatcacatctctgaattggataaggaggttcagcaccttcatgagaatataagtgccctaaccaaagaactggaatttaaggggaaagaaattctcagaatacgaagtgaatctaaccaacagataaggttgcatgaacaagatttaaacaagagacttgaaaaagagttggatgtcatgacagcagaccacctcagagagaaaaatatcatgcgggcagattttaataagactaacgagctactcaaggaaataaatgccgctttacaagtgtcattagaagaaatggaagaaaaatatctaatgagagaatcaaaaccagaagatatacagatgattacagaattaaaagccatgcttacagaaagagaccagatcataaagaaactaattgaggataataagttttatcagctggaattagtcaatcgagaaactaacttcaacaaagtgtttaactcaagtcctactgttggtgttattaatccattggctaagcaaaagaagaagaatgataaatcaccaacaaacaggtttgtgagtgttcccaatctaagtgctctggaatctggtggagtgggcaatggacatcctaaccgcctggatcccattcctaattctccagtccacgatattgagttcaacagcagcaaaccacttccacagccagtgccacctaaagggcccaagacatttttgagtcctgctcagagtgaagcttctccagtggcttctccagatccccagcgccaggagtggtttgcccggtacttcacattctgaaagaattgtgttggcacagctctgtatagactgttactaagagcatgactttatacagattgttatgtaaataggctttcctatgtcaaacactgtgaatgagaaagtatttgtctctccaacttgaaaatgcactgtatttcctgtgatatttattggaatcattctataaggtactatattatgtgtgtaattataactgttatttttatttgagatggaagagtctttaacctttgtaattactgcataataaattttgttagaatcaaaaaaaaaaaa

SEQ ID NO: 524 - DNA, 1715 bp, Homo sapiens
  CDS (157)..(1365)
caacgggagagaggaagctctagtgagaacaggtgatagaggcataacttctaagttgggatagtggagcagccgccgcagctgcggggccgccgcttggctctgggacagggagcgcacggagagttggcgaggaaatgtaatgtcctcctctgtatgcatcagtctttcctcacgaggttaatttccagtcagcatcagaaaaggttgagcatctctcaccttaaaaaaaaaagggcctattccctggtggattccagtcaagtgtctacatttctgatttccattcttcttatagtctatggtagtttcaggtcccttaatatggactttgaaaatcaagataaggagaaagacagtaatagttcttctgggtctttcaatggcaacagcaccaataatagcatccaaacaattgactctacccaggctctgttccttccaattggagcatctgtctctcttttagtaatgttcttcttctttgactcagttcaagtagtttttacaatatgtacagcagttcttgcaacgatagcttttgcttttcttctcctcccgatgtgccagtatttaacaagaccctgctcacctcagaacaagatttcctttggttgctgtggacgtttcactgctgctgagttgctgtcattctctctgtctgtcatgctcgtcctcatctgggttctcactggccattggcttctcatggatgcactggccatgggcctctgtgtcgccatgatcgcctttgtccgcctgccgagcctcaaggtctcctgcctgcttctctcagggcttctcatctatgatgtcttttgggtatttttctcagcctacatcttcaatagcaacgtcatggtgaaggtggccactcagccggctgacaatccccttgacgttctatcccggaagctccacctggggcccaatgttgggcgtgatgttcctcgcctgtctctgcctggaaaactggtcttcccaagctccactggcagccacttctccatgttgggcatcggagacatcgttatgcctggtctcctactatgctttgtccttcgctatgacaactacaaaaagcaagccagtggggactcctgtggggcccctggacctgccaacatctccgggcgcatgcagaaggtctcctactttcactgcaccctcatcggatactttgtaggcctgctcactgctactgtggcgtctcgcattcaccgggccgcccagcccgcccttctctatttggtgccatttactttattgccactcctcacgatggcctatttaaagggcgacctccggcggatgtggtctgagcctttccactccaagtccagcagctcccgattcctggaagtatgatggatcacgtggaaagtgaccagatggccgtcatagtccttttctctcaactcatggtttgtttcctcttagagctggcctggtactcagaaatgtacctgtgtttaaggaactgccgtgtgactggatttggcatttaaagggagctcgtttgcaggagagaggtgctggagccctgtttggttccttctcttcctgcggatgtagaggtggggccccttccaagagggacaggcctctccccagcgcgccttccttcccacgtttttatggatctgcaccagactgttacccttttgggggaagtggagatttgactgttaaaactgaaacagcgagtatctttt

SEQ ID NO: 525 - DNA, 518 bp, Homo sapiens
  CDS (49)..(195)
ggggcttgcgacggaagtggcctctctgcttctgcagggctggggaagatgctgcgtccagcgttaccgtggctgtaccttggcctctgcagcctcctggtgggggaggcagaggccccgagccccgtggatccgctggagcggagccggccgtacgcggtgctgcgagggcagaacctggatcaaactcttcattgaagtactcatcaggcgtgatggctgtggggttgtttgcagtagcacattccgtggtgaggtcctgctgagccagaactcaggagagtcagaaatgccaaatgatgttcacaagtgaaggcctgtggcactcagtgtctgaggtggacgtgttaaccagctaaagaccgggaagttctattcactaacttttttgcatggaacaagaaaatctatgaggatatcaccaaactacacaggaagtgtaatggatttcttcattttaaaatatttctctactctcctttacatttttatctcctgattataacaaaaaaaaaaaa

SEQ ID NO: 526 - DNA, 3052 bp, Homo sapiens
  CDS (112)..(2307)
gatattgagccagatttattaactccaaggcaagaagcagttcctgttgtctctttaccggcacccagtttttctcatgaagttggaagtgagctggcctcagttcctgttatgcccttaacttctattttgccactacaagtggaagagagcgctctgccatctgcagtgctggcaaatggaggaaagatgcccttcactatgccagaagcttttctagatgatggagatatggtccttggagatgaactagatgacctgcttgattctgcacctgaaactaatgaaactgttatgccgtcagctttagtcagaggaccccttcagacagccagtgtctctcctagcatgcccttttcggcatcgctgttaggaaccttacccattggtgcgaggtatgctcctccaccctccttctcagaattttatccacctttgacttcatccttagaagatttttgttcttctttaaattcattttcaatgagtgaatccaaacgagatctgtccacctcaacttctagagagggaacaccgcttaacaacagtaattcttcccttttacttatgaatggaccaggtagtttgtttgcttcagagaatttcctgggaatttcaagtcagcctagaaatgactttggaaacttttttggaagtgcagttaccaaaccatcttcatcagtgactccaagacatcccctcgaaggaacccatgaattgagacaagcttgccagatctgttttgtaaaatcaggccctaagttaatggatttcacttaccatgctaacatagatcataagtgtaagaaagatattttaatcggtaggataaagaatgttgaagataaatcatggaaaaaaatacgtccaagaccaacaaaaacaaattatgaaggaccatattatatatgtaaagatgttgctgctgaggaggaatgtagatattcaggccactgcacgtttgcttattgccaagaggagatagatgtgtggacactggagcggaaaggagcattcagccgggaggctttctttggcggcaatggaaagattaaccttactgtgttcaaacttctccaggagcatcttggggaatttatattcctttgtgagaaatgttttgatcataagcctagaatgataagtaaaagaaataaagataattctactgcttgttctcacccggttacaaagcatgagtttgaagacaataagtgccttgtccacattttgcgagagacaacagtaaaatactccaaaatacgttcttttcatggtcagtgtcagcttgatttatgtcgacatgaagttcggtatggctgtttaagggaagatgagtgcttttatgcccatagtcttgtggaactgaaagtctggataatgcaaaatgaaacaggtatctcacatgatgctattgctcaagagtctaaacgatattggcagaatttggaagcaaatgtacctggagcgcaggtacttggtaatcaaataatgcctggatttcttaatatgaagataaagtttgtgtgcgcccagtgtctgagaaacggtcaagtcattgaaccagacaaaaacagaaaatattgtagtgcaaaagcaaggcattcgtggaccaaagaccggcgtgcgatgagagtgatgtctattgaacgtaagaagtggatgaacatccgtcctctccccacaaagaaacaaatgcctttacagtttgatctgtgcaaccatattgcttctgggaaaaaatgtcaatatgtgggaaactgttcctttgctcatagtcctgaggaaagagaagtttggacttacatgaaggagaatgggatacaagatatggagcaattttacgaactatggctcaagagtcaaaaaaaaaaaaaaagtgaagacatagccagtcagtcaaacaaggaaaatggaaaacaaattcacatgccaacagattatgctgaagttacagtggactttcactgctggatgtgtgggaaaaactgcaacagtgagaagcagtggcagggccacatctcctccgagaagcacaaagagaaggttttccacaccgaggacgaccagtactgctggcagcaccgcttcccaacaggctatttcagtatttgtgataggtatatgaatggcacctgcccagaaggaaacagctgtaaatttgcacatggaaatgccgaacttcatgaatgggaagagagaagagatgccctaaagatgaagctcaacaaagcacgaaaagatcacttaattggcccaaatgataatgactttggaaaatatagttttttgtttaaagatttaaactaatatgctggcttttatgtatgatacctaatcagagcattgaccagaaaaattgaaagtgttctgaggcacatagcagaggagctgcagatttcctgcttgtattggcgtatatcgttcctcctgagcagcaacccacagtaggtaggaaaatgggctgtttcacaggcctggccacgctctcacggaaccactggcatcagatggtgaagtgactgctacccggttgccatctgttgaacagacttttggatgaagtgtgttggggaagaggataaggttatatctaggacaactctttgagttggtccttcatataagaatcgtgacggtaagagaataaacacttgtactgggatcagaatacatgatggatgaaattctttacatgttttagcagaatgaatttgtttaatataataaagtttgctacttatctgtatgtaggttgctaaaaaggattttcttaactcagattttaagccaaataaccatttaacactagtatttgttaaatggggtatttttctgtatttgtatgtttcactataataagggaattaaggataatgtgcattgagaatattttgaaaaataattgactcaaattttatttcttggtcttttgctgtttaaatgatgattttgaaagattaaacctgtactgttggtattgtgttagtgtatggaccaatactgcctgtaataaagattttatatatagatgcctttcaaaaaaaaaaaa

SEQ ID NO: 527 - DNA, 1631 bp, Homo sapiens
  CDS (227)..(1285)
cccacgcgtccggggacccacgtgggagcctgggagcgggtggtcgtagctcggtagtccagttgtgggtaatcggggctgtttgttcctgtccgagagagctcggcggagacggctgtcgagtacccttcacctcggtgttgggagcctgggagcgaactgcggcgcgggttaccgctcccggggacgcagcaaggggcatcgagtccctggcgggagctgcgccatggcattgctctcgaccgtccggggcgcgacctggggtcgcctcgtcacccgtcatttctcccatgcagcgcggcatggggagcggcctggtggggaggagctaagccgcttgctgctggatgacctggtgccgacctctcggctggagcttctgtttggcatgaccccgtgtctcctggctctgcaggccgcccgccgctctgtggcccggctcctgctccaggcgggtaaagctgggctgcaggggaagcgggccgagctgctccggatggccgaggcgcgggacattccagttctgcggcccagacggcagaaactggacacaatgtgccgctaccaggtccaccagggtgtctgcatggaggtgagcccgctgcggccccggccttggagagaggccggggaggcgagcccaggcgacgacccccagcagttgtggctcgtcctcgatgggatccaggatccccggaattttggggctgtgctgcgttccgcacacttcctcggagtggataaggtcatcaccagccggagaaacagctgcccgctcactccagtagtcagcaagtccagcgcgggggctatggaggtgatggacgtgttctccactgatgacctcaccggatttttacagaccaaagcccagcagggctggctcgtggccggcacggtgggctgcccaagcacagaggatccccagtcctccgagatccccatcatgagttgcttggagttcctctgggaacggcctactctccttgtgctggggaatgagggctcaggtctatcccaggaggtgcaggcctcctgccagcttctcctcaccatcctgccccggcgccagctgcctcctggacttgagtccttgaacgtctctgtggctgcaggaattcttcttcactccatttgcagccagaggaagggtttccccacagagggggagagaaggcagcttctccaagacccccaagaaccctcagccaggtctgaagggctcagcatggctcagcacccagggctgtcttcaggcccagagaaagagaggcaaaatgagggctgacgtggactgtccacagtgttcatgtgctggagtcagggacggccgcacctgcctccgccggctccagtgtgcggggagcctctgcctgagtgtgcaccaggcccatgtttattgaccacagtctgagggggggggaaggggactgcggtggacaccagaggaagctgtttcctgttgtgatgttggacctgtagtaggacatggtgatttgttaatttccatgggaagccatgatggcctagcatggagggaatctgttcccaggccctgcctggaagttgagggaaagtttagacatctgcagagaggcaggcagcccagcccaggggacccgttcctcttg

SEQ ID NO: 528 - DNA, 6151 bp, Homo sapiens
  CDS (263)..(3133)
tttcgtgctcgctcggtctccggctccggcgccggctcctgctcctcctggccgcccggggccaaggcgacgagaggttgtaaaaatccatgtgggacggccccggggcgagcatcggaaagatctctgagtggagttattttctggtacggactgtgaaaagaatgcggtgaaaattctggacaatcgtggaaatattagctcaaaccccaacttaatatagcatttcttctcttcagtaacacctcataatacaagaaaaatgtatggaagtgcaagaacaatcaccaatctggaaggtagcccttccagatcccctcgtttgccaaggtctcctcgtttgggccaccgaagaacaagtagtgggggaggtggaggaacaggcaagactctgtctatggagaatatccagtccctcaatgcagcctatgctacgtctggacccatgtatctgagtgatcatgaaggggtggcttcaacaacctacccaaagggcactatgactctgggaagggctacaaatcgagctgtatatggaggccgtgtcacagccatggggagtagtcccaatattgcttctgctggactttcccacacagatgtcctttcatacacagatcaacatggtgggctgactggctcatcccatcatcaccaccaccaggtcccctccatgttgaggcaggtaagagacagcacaatgttagatcttcaggcccagctgaaagaactgcagagagagaatgacctcctccggaaagagctagacatcaaggacagcaaattgggatcttccatgaacagtattaagactttctggagtcctgagcttaagaaggagagagtcttgaggaaagaagaggcagcgcggatgtctgtcctcaaggagcagatgagggtttcccatgaagaaaatcagcacctacagttgacaatccaggcccttcaagatgagctgcgaacccagagagacctcaaccacctcctccagcaagagagtggcaaccgaggagcggagcacttcaccatcgagctgaccgaggagaactttaggcggctccaagccgagcatgacaggcaggctaaggagctgttccttttgaggaagacattagaggaaatggagctgagaattgaaacgcagaaacaaaccctcaatgcccgagatgagtcaattaaaaaacttcttgagatgttgcaaagtaaaggcttgccatccaaaagcctggaggatgacaatgagcgaacgcggcggatggcagaggctgagtctcaggtcagccacttggaagtgattttagatcagaaagagaaggaaaacatacatcttagagaggaattgcaccgaagaagccaacttcagccggagccagccaagacgaaggctctccagactgtcatcgaaatgaaggacacaaaaatcgcttcattggaacgaaacataagggatcttgaggatgagatccagatgttaaaagccaatggtgtgctgaacactgaggaccgcgaagaagagatcaaacaaattgaggtttacaaaagtcactccaagtttatgaagaccaagattgatcagctgaagcaggaactttcaaagaaagagtcggaacttcttgccttacaaacaaagcttgaaaccctcagcaatcaaaattcagattgcaagcaacacattgaagtgctcaaagagtcacttactgccaaagaacagagggctgccatccttcagactgaggtagatgcgctgagattacgactggaagaaaaagaatctttcctcaataaaaaaacaaaacagctacaggacctcacagaagagaaggggacactggccggtgaaattcgtgacatgaaagatatgttagaagtgaaggaaagaaaaatcaatgttcttcagaaaaagattgaaaacttgcaagaacaacttagggataaagacaagcaactgaccaacctgaaagacagagtgaagtccttgcagacggattccagtaatacagatactgcactggcgacgctagaggaagctctgtcagagaaggagagaataattgagcgcttgaaagaacagcgagaaagagatgatcgggaaagactagaagagatagaatccttccgaaaagagaacaaagacctgaaagagaaggtcaatgctttacaggctgaactgactgagaaagagtctagtttaattgacctcaaagaacatgcatcttcattagcctctgcggggctgaaaagggattccaaattaaaatctctagaaatagccattgaacaaaagaaagaggaatgtagcaaattggaagcacagttaaaaaaggcacataatattgaagatgactccaggatgaaccctgagtttgcagaccaaataaaacagctcgataaagaggcgtcttactaccgcgacgagtgtggcaaggcccaagcggaagtggaccggttgctggagatcctcaaggaggtggagaatgagaagaatgacaaggacaagaagatcgcagaactggagagcttgactctcaggcatatgaaagatcagaataagaaggtggccaacctcaagcacaatcaacagttggaaaagaagaaaaatgctcagttactagaagaagtgcgcaggcgagaagacagcatggctgacaactcacagcatttgcagatagaggaactgatgaatgcactggagaagaccagacaggaactggatgccaccaaagcacgcctcgcctccacacaacagtccctggccgaaaaagaagcgcacttggccaacctccggattgagaggaggaaacagctggaggagatcctggagatgaaacaggaagcactacttgcagccatcagtgaaaaagatgcaaacattgccttgctggaattgtctgcctccaaaaagaaaaagacgcaggaagaagtcatggccctcaagcgggaaaaagaccgactagtacatcaattaaagcagcagacccagaacagaatgaagttgatggcagacaactatgatgatgaccatcaccattaccaccaccaccaccatcaccaccaccatcgatctcctgggaggtcgcaacattccaatcacaggccctctccggaccaggatgacgaggagggcatatgggcatagccgggcctgtaaaccaaagttccagttttgttttgagggctattagaagggctgaataaagggaacatgcagctctgcagcaatattctgataatgtattgcagtgcggctcacatcactgtccaccaccacctggagcggctcatcagaactgaaggggagttttcacttaccttattgagcgtgattctgttctacttgatatttccttcaccacctcatgtcatttctcatggatttgggtatgatggaaaggaagaatgcagaggaggagaaaagtgacagatcctccatttttgttgggatgcgggcattttgaatgtgatcatctttgctgaatgtcattatttgataacattttgtttatgttacttaaacatcattggataaatttgaactccatgggattttatctgtggattcagcttctgttggacaactagcctcatctccagtatcctgctggttcactctaattggtcattcctaatgcattagattatcaaaaagtataaattcgctgtgagtgagtggtgttggcagtgtttgtataccatgatgcatggagtgtttgacgaagaaacaaaaaacaccaaaaattgcgagcctttaccctcctctatttctttaatctgttgtttgaagaaccgcattttgagggtgtaaccagtagtcacctctgggccaggttggaaaagaaatcaattttttaaaccactaatgcttgccaagaaatcgccttatgagaacatggtgtgtgtctctgacaatgcgtggcacatctaaattgatcattcataattttatctacccagtcatgtactggagagtggcaaaagtctgaggcacctgcatatctctagtccctgtgttctgcacatccccacggtggggacgccaccaagcctcagactcttaccatcccggtgcatgcaggtctccatgaagaagctgggactcattcacatttcaagatccaaatgctgtgcaaacagtgtaagcttagattttctgtaaatgaagggtcatttctctttttttttttttttaaagaaaatgtgtctgcaacatggattccaaagcattttcagcatcaaacatgaaaacattgatgaatgaggaacaatcacaaaagctgtgtctctgtatatagctctacacaacatgtatgtggatacagtcattatttaaagcacatgccagggaaaaagaccaaattttgaggtcttttacatacagtgatatggtactaaggagaattaaactcctactgcttcctctgaatattaagaaacaatttaaattgttataacttcataaaactcatgactgagtctggcaaacatgtgcaactcttgtattgctccattttcttgtcaatggaagaaacccttccacgtgtatgcaagtgggagatgaaaacctgcatttttaaaggacaaacagtgaatttaagcatgagtggccttaataaatatagttgtctttctttgctgctgtggaaaggattctaaacagatgtccctgaagtcttgcattgaatttagtcattattattactttttaaaatgttggtgcaattaactctggacctctcttgtgagccatagagatatttaaaagacaaacaccttatttgtcggggaagatgaaaccgtccctgagttgcaccattctttcttggtgcattcgcggttaagatactcaagcaggtttcttgcttctggctttgttcttgtcatcagtaagtataacaaactatgtaatgcttatgtgttgcataaacaatccaaatgcattcatgttttaaaagtttgtcctttaactatcagagggatctaggtcttggttagagaagtaagcagagttctttgcaagcttatttagcacattttgacacaatgttgcactgaaaacccaggccacaaatgtgtcccagtgaacagtttggatgtcctcaaagaagtggttctcactgcctcctacaaccaggtcttgacctgaactctgcaactgaatacttgaagtaggaagtaggaaatccagtagggaaaatagggtccttgaaacagaaaaaaaaaaccaacccatgtatagctagctatttctatgtatgtgccaattttgtcacagctcttgtttggagggatcattttctgcccaactttcattggttaaaatattactgatcttacctttatgaggtcgtataatttagtcccttaaaaattaaattctctctaacataacaacctttcccatttcgtgtaatattctctgatgtttgggggttaccaaaaatatccctttttcacatattaagaatagtctctgggtttacaacaaacactgtgatgttgggaagctatttcctttgcgcaaactttaacaggttttcttctaatcataacatagttgaaaaaagaagtttgggctaacatttaggagaagttggtcttactttgtgcaaaagcaggcttgtgctttataccccatttgatttcgatgtacagtctcaattttgtatttaatgatttttgtgtatccagtatgcacgttaacagcgtgtcaactttcatttgaaagtgggtttcaatttactttttaaacagtgtttatgacgagacctcagatgtgttgacgtaagctctatctgcaatgtttttgtgtagagtggcgattgaatgctgcccagggtcagtgtatctaattccccgagaccctcgtttgatagtgcttcttgtaatatttcttcaagtgagtggcatgtgggttgtgatattgaccatgtgattatggacatcgatatgaaaaataaataaataaaactaaggaaccctggaaactaccagtgggcatgtattagccagtcattgtaacctcgtgtctagtagaacaatgtacaaggtatgtacagttcataaatttgttgtcatgtgtatgagaagtactttgtgctgatcgccttatttatattcatcaaataaaccttgtttctttctgaaaaaaaaaaaa

SEQ ID NO: 529 - DNA, 2651 bp, Homo sapiens
  CDS (147)..(1970)
  misc_feature (1)...(2651): n = a,t,c or g
aattctgtcgggcccgcccgctgacgtcacctgctagccccgcctcctctagggtcccgggcccctgcggcgggggctgccccgggggcagtcagttgaggcggcgggagctcggcggagggcgggccaggtgactggtccgggccatgccgaggaagaagccattcagcgtgaagcagaagaagaagcagttgcaggacaaacgggagcggaagagagggcttcaagatgggctgcgctccagttccaacagccgcagcgggagccgggagcggcgagaggaacagaccgacacctcggacggggagtctgtgacccatcatatccgcaggcttaaccagcagccttctcaggggctgggtccacgaggctacgacccaaatcgataccgactgcattttgagagagacagcagggaggaggtagagaggagaaagagagcagcccgggagcaagttctacagccggtcagtgctgagttgttggagctggacatccgggaggtgtatcagcctggctcagttctggactttcctcgacgtcctccttggagctatgagatgtccaaggagcaactaatgagccaagaggaacggagcttccaagactatcttgggaagattcatggggcttactcctctgagaaactcagctactttgagcacaatctggagacatggaggcagctgtggcgggtgttagagatgtctgacatcgtcctgcttatcactgatatccgacatccagttgtgaatttcccgccagcactttatgagtatgtgactggagaacttggactggccctggtgctggttttgaacaaggtggatctggccccgccagctcttgtggttgcctggaagcattatttccatcaacactatccccagctccacgtcgtccttttcacctcttttcctcgggacccccgcaccccacaggaccctagtagtgtcttgaagaagagtcggaggcgggggagaggatggactcgggccctggggccagagcagttgctgagagcctgtgaagccatcactgtggggaaagtggacttgagcagctggcgggagaagattgctcgggatgtggctggggccacctggggtaatggctctggggaggaggaggaagaggaggatggcccagcagtcctggtggagcagcagcagactgattcagcaatggagccaactggcccaacccaagagcgctacaaggatggggtggtgaccatcggctgtgtgggtttccctaatgtgggaaagtcctcgctgatcaatgggctggtggggcggaaagtcgtgagtgtctccagaaccccgggccatacccgatactttcagacctactttcttaccccctctgtgaagctctgtgactgcccaggcctcatcttcccatctcttctgcctaggcagttgcaggttctggcagggatctaccctatcgcccagatccaggagccctacactgctgtgggctacctggcctcccgaattcccgtgcaggccctgctccacctgcgccacccagaggctgaggacccctcagcggaacacccctggtgtgcctgggacatctgtgaagcctgggcagagaaacgtggttacaagacagccaaggcggctcggaatgatgtgtacagagcagccaacagtctcttgcggctggcagtggacggccgcctcagcctgtgttttcatcccccaggctacagtgaacagaaaggcacctgggagtcccatccagagaccacggagctggtggttttgcagggcagggtggggccagcaggtgacgaggaggaggaggaagaggaagagctgagcagctcctgtgaggaggagggagaggaggaccgggatgcggatgaggagggagaaggggatgaggagaccccaacctcggctccagggtccagcctggctggccgaaacccttatgccctgctgggtgaggatgagtgctgagttcctcgcccagcgccatcttccctcccagtatctttgcttttggactgacctgggggtatctcccctctgccaccccaattgtgaataaagattgtttgctttgtacacatcattccgagccgccttggctgtcttgtaaccacgtttctctgcccaggcttcacagatgtcccaggcacaccaggggtgttccgctgaggggtcctcagcctctgggtggcgcaggtggagcagggcctgcacgggaattcgggaggccaggtagcccacagcagtgtagggctcctggatctgggcgatagggtagatccctgccagaacctgagggaaatgagcactcagtactttcctcaatgtcccaccttctctctttcccttacccaccctccccgtcatacctgcaactgcctaggcagaagagatgggaagatgaggcctgggcagtcacagagcttcacagagggggtaagaaagtaggtctgaaagtatcgggtatggcccggggttctggagacactcacgactttccgccccaccagcccattgatcagcgaggactttccctcattagggaaacctgaggaaggcaaggaaaattaacgtttaacaggtttctactctgtgatgggacgaattcctgctctcgnggcatgatatgcattcaatgggggcggg

SEQ ID NO: 530 - DNA, 1274 bp, Homo sapiens
  CDS (696)..(959)
aatatactcttgttttcaatttctcttggcactcagagatgaatctgtgtgagcacggagagctagagatctcagagcagccaggaactgagatgcaaatcatttcacctttgtgtggtctgctcattctgtagtctttgtcttacccttaaagtgggaaactctttgacagggaaatgccatgtttgaactgaagaagcctactttatagttttttctctcttgcctaatgttttcagtagcgtactatgttgggtgttttagtatgccacatggtctctattctctgaagctgtatgatgaaacaagtacctaactttaacaggagataattaatgtcttaagggaagtactaacagaattgctttagagtctgggattttttttttattgcaagaactatttttcatggtggaaaggagaatttatattaaagaaccagtgggctcctgggcccaccatggcacatttagccttcactgggaagtagaactaaatgaaagccatcagcagccaacacagcttcacttcagctcattgtatctgaatccagtgttcccaaggacatcagtgactttatttttttgaaaactgtaatgctttaaaacttactttattggatctctttgcagcttttgacacagtgaaccactttcctttcctgaaatgctttcctctcttggctttctgatgccatgttctcctgtttcttctctacttctctggccacttctgtctccttagaagctcagtcttgctttgcctggcccttgattgttagttttccccagggctcacttcttagcccctttctcctcatgtcttataatttgagtcatctcatctactctggggagttgaatggtcgcttgtatgctgaaaactcccaaatttgtatctgtagcccagcttttcctactaagctctacttacatatctttgcagacctcattacttcttgactaacttactggctccttaaatatctaaaattgaatccatgttctacctccccatacaaaaagttcctcctccttccctaccacagttaacagttaccattactctggccattactatcctggtctctctgcctcctgatgggagtcagctcctcctgtcaagttggcctccacagtggctttcacatgtctaccttccactctgctaatttctgagcagttaccacattcttgctcaacagtaggtaccagtcacctggattgcttattaaatagttgaattatggagccccaggaatgtagaaaatttac

SEQ ID NO: 531 - DNA, 2633 bp, Homo sapiens
  CDS (22)..(2370)
tttcgtcgcgtgccgggtgtcatggcggcctgcaggtactgctgctcgtgcctccggctccggcccctgagcgatggtcctttccttctgccacggcgggatcgggcactcacccagttgcaagtgcgagcactatggagtagcgcagggtctcgagctgtggccgtggacttaggcaacaggaaattagaaatatcttctggaaagctggccagatttgcagatggctctgctgtagtacagtcaggtgacactgcagtaatggtcacagcggtcagtaaaacaaaaccttccccttcccagtttatgcctttggtggttgactacagacaaaaagctgctgcagcaggtagaattcccacaaactatctgagaagagagattggtacttctgataaagaaattctaacaagtcgaataatagatcgttcaattagaccgctctttccagctggctacttctatgatacacaggttctgtgtaatctgttagcagtagatggtgtaaatgagcctgatgtcctagcaattaatggcgcttccgtagccctctcattatcagatattccttggaatggacctgttggggcagtacgaataggaataattgatggagaatatgttgttaacccaacaagaaaagaaatgtcttctagtactttaaatttagtggttgctggagcacctaaaagtcagattgtcatgttggaagcctctgcagagaacattttacagcaggacttttgccatgctatcaaagtgggagtgaaatattcccaacaaataattcagtgcattcagcagttggtaaaagaaactggtgttaccaagaggacacctcagaagttatttaccccttcgccagagattgtgaaatatactcataaacttgctatggagagactctatgcagtttttacagattacgagcatgacaaagtttccagagatgaagctgttaacaaaataagattagatacggaggaacaactaaaagaaaaatttccagaagccgatccatatgaaataatagaatccttcaatgttgttgcaaaggaagtttttagaagtattgttttgaatgaatacaaaaggtgcgatggtcgggatttgacttcacttaggaatgtaagttgtgaggtagatatgtttaaaacccttcatggatcagcattatttcaaagaggacaaacacaggtgctttgtaccgttacatttgattcattagaatctggtattaagtcagatcaagttataacagctataaatgggataaaagataaaaatttcatgctgcactacgagtttcctccttatgcaactaatgaaattggcaaagtcactggtttaaatagaagagaacttgggcatggtgctcttgctgagaaagctttgtatcctgttattccccgagattttcctttcaccataagagttacatctgaagtcctagagtcaaatgggtcatcttctatggcatctgcatgtggcggaagtttagcattaatggattcaggggttccaatttcatctgctgttgcaggcgtagcaataggattggtcaccaaaaccgatcctgagaagggtgaaatagaagattatcgtttgctgacagatattttgggaattgaagattacaatggtgacatggacttcaaaatagctggcactaataaaggaataactgcattacaggctgatattaaattacctggaataccaataaaaattgtgatggaggctattcaacaagcttcagtggcaaaaaaggagatattacagatcatgaacaaaactatttcaaaacctcgagcatctagaaaagaaaatggacctgttgtagaaactgttcaggttccattatcaaaacgagcaaaatttgttggacctggtggctataacttaaaaaaacttcaggctgaaacaggtgtaactattagtcaggtggatgaagaaacgttttctgtatttgcaccaacacccagtgctatgcatgaggcaagagacttcattactgaaatctgcaaggatgatcaggagcagcaattagaatttggagcagtatataccgccacaataactgaaatcagagatactggtgtaatggtaaaattatatccaaatatgactgcggtactgcttcataacacacaacttgatcaacgaaagattaaacatcctactgccctaggattagaagttggccaagaaattcaggtgaaatactttggacgtgacccagccgatggaagaatgaggctttctcgaaaagtgcttcagtcgccagctacaaccgtggtcagaactttgaatgacagaagtagtattgtaatgggagaacctatttcacagtcatcatctaattctcagtgattttttttttttaaagagaattctagaattctattttgtctagggtgatgtgctgtagagcaacattttagtagtatcttccattgtgtagatttctatataatataaatacattttaattatttgtactaaaatgctcatttacatgtgccatttttttaattcgagtaacccatatttgtttaattgtatttacattataaatcaagaaatatttattattaaaagtaagtcatttatacatcttagaaaaaaaaaaa

SEQ ID NO: 532 - DNA, 4113 bp, Homo sapiens
  CDS (1030)..(3870)
gataggacgaagaaaccgaagggaaagctcagggccgccaacttccagctgcagcggcgactttcagtttcatttccacggaccctcctgcctgggccgcagccgccgccgcgatgcccagtaagttcagctgccggcagctccgggaggcgggccagtgtttcgagagtttcctggtcgttcggggactggacatggagacagatcgcgagcggctgcggaccatttataaccgcgacttcaagatcagtcttgcctccagcaaatccatcctccaatcctgatgccagagtgatctgaaatgcaaatatgatcttgccactcccctgcttaaaacccaccaaccgcagtggttctgtaaccacagtgtagcctctgacgtgggctgaaagcacaaagccaggctatttgatctctggagaaggatcctttcccttcctgcttgggttccacctgcaccctatgacttcgggtggaaactgctgtctgatcagccaccttgcccacacacttggacatctgtactgtctctgatcccttctctcctcaccaacaggctggaccccacatccacccctctgaatcaaatcattccgcttccccttagcctcagctctttcttctgggttgtttgtattttcttttctgtcccaaacagtttcccccacaaaaagaactttatgtctttctctgtcttccctcagtccttccagtcagcagcctgtgattgggcttttcccctcagaaacgaacaatccagaacccactgtttaaaacaactgtattttgccttgggaagtcccattgccttccctgaaaacattaaacattcctccgatccccagcctgagtctctctgtctctgggccccatcctgctccacagcagggctggtgtgtccagcacagagtgaccctccgatgccctttcccacccgccgccctgcctccctcgagccctgccttccctcacttcccagtctcctctgcttctggcagctttgggacccccgcccctggcttctcctccatgctgtatggaatgaagattgcaaatctggcctacgtcaccaagactcgggtcaggttcttcagactcgaccgctgggccgacgtgcggttcccagaaaagaggagaatgaagctggggtcagatatcagcaaacaccacaagtcactgctagccaagatcttttatgacagggctgagtatcttcatgggaaacatggtgtggatgtggaagtccaggggccccatgaagcccgagatgggcagctccttatccgcctggatttgaaccgcaaagaggtgctgaccctgaggcttcggaatggcggaacccagtctgttaccctcactcacctcttcccactctgccggacaccccagtttgctttctacaatgaagaccaggagttgccctgtccactgggccccggtgaatgctatgaactccatgtccattgtaagaccagctttgtgggctacttcccagccacagtgctctgggagctgctgggacctggggagtcgggttcagaaggagccggcacattctacattgcccgcttcttggctgccgtcgcccacagccccctggctgcacagctgaagcccatgactcccttcaagcggacccggatcaccggaaaccctgtggtgaccaatcggatagaggaaggagagagacctgaccgcgctaagggctatgacctggagttaagtatggcgctggggacatactacccacctccccgcctcaggcagctgctccccatgcttcttcagggaacaagtatcttcactgcccctaaggagatcgcagagatcaaggcccagctggagacagccctgaagtggaggaactatgaggtgaagctgcggctgctgctgcacctggaggaactgcagatggagcatgatatccggcactatgacctggagtcggtgcccatgacctgggaccctgtggaccagaaccccaggctgctcacgctggaggttcctggagtgactgagagccgcccctcagtgctacggggcgaccacctgtttgcccttttgtcctcggagacacaccaggaggaccccatcacatataagggctttgtgcacaaggtggaattggaccgtgtcaagctgagcttttccatgagcctcctgagccgctttgtggatgggctgaccttcaaggtgaactttaccttcaaccgccagccgctgcgagtccagcaccgtgccctggagctgacagggcgctggctgctgtggcccatgctctttcctgtggcacctcgggacgtcccgctgctgccctcagatgtgaaactcaagctgtacgaccggagtctggagtcaaacccagagcagctgcaggccatgaggcacattgttacgggcaccacccgtccagccccctacatcatctttgggcctccaggcaccggcaagactgtcacgttagtggaggcaattaagcaggtggtgaagcacttgcccaaagcccacatcttggcctgcgctccatccaactcaggggctgacctactctgtcaaaggctccgggtccaccttcctagctccatctaccgcctcctggcccccagcagggacatccgcatggtacctgaggacatcaagccctgctgcaactgggacgcaaagaagggggagtatgtatttcccgccaagaagaagctgcaggaataccgggtcttaattaccaccctcatcactgccggcaggttggtctcggcccagtttcccattgatcacttcacacacatcttcatcgatgaggctggccactgcatggagcctgagagtctggtagctatagcagggctgatggaagtaaaggaaacaggtgatccaggagggcagctggtgctggcaggagaccctcggcagctggggcctgtgctgcgttccccactgacccagaagcatggactgggatactcactgctggagcggctgctcacctacaactccctgtacaagaagggccctgatggctatgacccccagttcataaccaagctgctccgcaactacaggtctcatcccaccatcctggacattcctaaccagctctattatgaaggggagctgcaggcctgtgctgatgtcgtggatcgagaacgcttctgccgctgggcgggcctacctcgacagggctttcccatcatctttcacggcgtaatgggcaaagatgagcgtgaaggcaacagcccatccttcttcaaccctgaagaggctgccacagtgacttcctacctgaagctgctcctggccccctcctccaagaagggcaaagctcgcctgagccctcgaagtgtgggcgtcatctccccgtaccggaaacaggtggagaaaatccgttactgcatcaccaaacttgacagggagcttcgaggactggatgacatcaaggacttgaaggtgggttcagtagaagaattccaaggccaagaacgaagcgtcatcctcatctccaccgtgcgaagcagccagagctttgtgcagctggatctggactttaatctgggtttccttaagaaccccaagaggttcaatgtagctgtgacccgggccaaggccctgctcatcatcgtggggaacccccttctcctgggccatgaccctgactggaaagtattcctggagttctgtaaagaaaacggagggtataccgggtgtcccttccctgccaaactggacctgcaacagggacagaatttactgcaaggtctgagcaagctcagcccctctacctcagggccccacagccatgactacctcccccaggagcgggagggtgaagggggcctgtctctgcaagtggagccagagtggaggaatgagctctgaagacacagcacccagccttctcgcaccagccaagccttaactgcctgcctgaccctgaaccagaacccagctgaactgcccctccaagggacaggaaggctgggggagggagtttacaacccaagccattccaccccctcccctgctggggagaatgacacatcaagctgctaacaattgggggaaggggaaggaagaaaactctgaaaacaaaatcttgttctatgcaaaaaaaaaaaa

SEQ ID NO: 533 - DNA, 1336 bp, Homo sapiens
  CDS (192)..(680)
atggctgccgccgtcgctgctgccggtgcaggggaaccccagtccccggacgaattgctcccgaaaggcgacgcggagaagcctgaggaggagctggaggaggacgacgatgaggaggtactagggcctcgcggggtgcagagcgggaagcgggcccgctcgtggctagatgagaccctgtcggagagactatggggcctgacggagatgtttccggagagggttgcggaacatctccggtgtcccctacagtcatggctgccgccgtcgctgctgccggtgcaggggaaccccagtccccggacgaattgctcccgaaaggcgacgcggagaagcctgaggaggagctggaggaggacgacgatgaggagctagatgagaccctgtcggagagactatggggcctgacggagatgtttccggagagggtccggtccgcggccggagccacttttgatctttccctctttgtggctcagaaaatgtacaggttttccagggcagccttgtggattgggaccacttcctttatgatcctggttcttcccgttgtctttgagacggagaagttgcaaatggagcaacagcagcaactgcagcagcggcagatacttctaggacctaacacagggctctcaggaggaatgccaggggctctaccctcacttcctggaaagatctagattgttattgctgtttgagctgtctcagtgggataagtttgaaattcaagtgtttgaactgctgataatttggattttttttttttttaactttggcacattgatctatctaaacctggtggggagaattatccccacattgtctcatggaaagactcaacttgcaactgtgccctccacactatccttacttctgtctccactctgataccagagtgcagccatgcagatggttattccagctctggtcacccgactcctttcaccaaattgctcctaactggaagatctcactttccccttgtggggtaggaaccgatgccagtgggagggatgtgcccctgaccattaacgactgtttttttttttttttttttaaagaatggagttgttggggcgggacatgcacacaatgtgaaacagacaaaatgcattacacctgtagtgtaaagtggccactatgaatccctatgtatgagaggagggaggcaggctgcagcttcagccacagaatggggactatggaagacagcaggagctcatttcctctgcacattttggctgttagacctgtgtgtgtgtttaaaaaaagagaagtcagtgctcactttttgtatttaaatattaaaaatgattccaactgaaaaaaaaaa

SEQ ID NO: 534 - DNA, 1805 bp, Homo sapiens
  CDS (103)..(936)
agctccgcgaattcccgggtcgacgatttcgtcggacccaagggcccgcctggagacattggcttcaaaggcatccagggccctcgggggccacctggcttgatgggaaaggaaggcatcgtcgggcccctcggaatcctgggaccttcgggactcccgggtccgaagggtgacaaaggcagccgtggggactggggattgcaaggtccgaggggtcctcccggccccagagggcggcccggccccccgggtcctccagggggtcctatccaattgcaacaagatgatcttggggcagctttccagacgtggatggacaccagtggagcactcaggccagagagttacagctatccagaccggctggtgctggaccagggaggagagatctttaaaacctccaaagagaaccccgcccgggtctgcagggacctcatggactgtgagcagaagatggtggatggtacctactgggtggatccaaaccttggctgctcctctgacaccatcgaggtctcctgcaacttcactcatggtggacagacgtgtctcaagcccatcacggcctccaaggtcgagtttgccatcagccgggtccagatgaatttcctgcacctgctaagctccgaggtgacccagcacatcaccatccactgccttaacatgaccgtgtggcaggagggcactgggcagaccccagccaagcaggccgtacgcttccgggcctggaatggacagatttttgaagctgggggtcagttccggcccgaggtgtccatggatggctgcaaggtccaagatggccgctggcatcagacactcttcaccttccggacccaagacccccaacagctgcccatcatcagtgtggacaacctccctcctgcctcatcagggaagcagtaccgcctggaagttggacctgcgtgcttcctctgacctctgacctcgtggccactctaggcctcacggaggagggaagaggaagaggcaaggggagggtactgaggggcagatggctccaggagaggcagctcccctgcccaagggtccttgggcagaccccagctgttgtctgcccagtaaaagtgggtgggggtaggaggggatagggtgtccttgggaacaatggatcccagcttagccccaaagaccaaccaaagagccagccagagtaagctggacctgcaacctgcctgagccccgtggcctctcagctctgcggccaccccgttccctccccagcttcctgcccaaagagccccacattcaagccaacttgagggaagggggcgtctcgtcagctggtccctgctagggagctattgatgtgcaatattagaaaggagacatgaaaaaaggagaaaaggaaagacagaagtgtatatatatattatttaaacaaacaaaaagaaggtgcgttactatttttttttcacccgggaaagaggtgagaggatgggaaggagcagccaggcgtgggaagcggcgagatcctcgggctgggggtgcccacgtttgctacctcccactgtgaaatcgctggtgctcacaattgtctctcacagtgtatgtgatttttttaaggaaaaaaaaaaaatccctatttaagattctgaaggtgctaccattattttgccacagactttgaagaaacttttggatgtggggcatcatccgcatctttctctctcctccaaatgacaaagtttggggaatttttgaattttcctagcatcgcccttgtgctcatcaggtaatctgctaaggaggaaaaaaagaaaagaaaaaaggaaaaaaaaaaa

SEQ ID NO: 535 - DNA, 1854 bp, Homo sapiens
  CDS (103)..(984)
agctccgcgaattcccgggtcgacgatttcgtcggacccaagggcccgcctggagacattggcttcaaaggcatccagggccctcgggggccacctggcttgatgggaaaggaaggcatcgtcgggcccctcggaatcctgggaccttcgggactcccgggtccgaagggtgacaaaggcagccgtggggactggggattgcaaggtccgaggggtcctcccggccccagagggcggcccggccccccgggtcctccagggggtcctatccaattgcaacaagatgatcttggggcagctttccagacgtggatggacaccagtggagcactcaggccagagagttacagctatccagaccggctggtgctggaccagggaggagagatctttaaaaccttacactacctcagcaacctcatccagagcattaagacgcccctgggcaccaaagagaaccccgcccgggtctgcagggacctcatggactgtgagcagaagatggtggatggtacctactgggtggatccaaaccttggctgctcctctgacaccatcgaggtctcctgcaacttcactcatggtggacagacgtgtctcaagcccatcacggcctccaaggtcgagtttgccatcagccgggtccagatgaatttcctgcacctgctaagctccgaggtgacccagcacatcaccatccactgccttaacatgaccgtgtggcaggagggcactgggcagaccccagccaagcaggccgtacgcttccgggcctggaatggacagatttttgaagctgggggtcagttccggcccgaggtgtccatggatggctgcaaggtccaagatggccgctggcatcagacactcttcaccttccggacccaagacccccaacagctgcccatcatcagtgtggacaacctccctcctgcctcatcagggaagcagtaccgcctggaagttggacctgcgtgcttcctctgacctctgacctcgtggccactctaggcctcacggaggagggaagaggaagaggcaaggggagggtactgaggggcagatggctccaggagaggcagctcccctgcccaagggtccttgggcagaccccagctgttgtctgcccagtaaaagtgggtgggggtaggaggggatagggtgtccttgggaacaatggatcccagcttagccccaaagaccaaccaaagagccagccagagtaagctggacctgcaacctgcctgagccccgtggcctctcagctctgcggccaccccgttccctccccagcttcctgcccaaagagccccacattcaagccaacttgagggaagggggcgtctcgtcagctggtccctgctagggagctattgatgtgcaatattagaaaggagacatgaaaaaaggagaaaaggaaagacagaagtgtatatatatattatttaaacaaacaaaaagaaggtgcgttactatttttttttcacccgggaaagaggtgagaggatgggaaggagcagccaggcgtgggaagcggcgagatcctcgggctgggggtgcccacgtttgctacctcccactgtgaaatcgctggtgctcacaattgtctctcacagtgtatgtgatttttttaaggaaaaaaaaaaaatccctatttaagattctgaaggtgctaccattattttgccacagactttgaagaaacttttggatgtggggcatcatccgcatctttctctctcctccaaatgacaaagtttggggaatttttgaattttcctagcatcgcccttgtgctcatcaggtaatctgctaaggaggaaaaaaagaaaagaaaaaaggaaaaaaaaaaaa

SEQ ID NO: 536 - DNA, 1535 bp, Homo sapiens
  CDS (279)..(650)
cgacgatttcgtgggatcagcagaagcctagaattacagattctgcactgaatggtcaaatacagctggagacatctccggtgtgtgaggtgcaaagtgatctaacattacagagtaacgggagccagtattctccaaattagattagagagaactcccctgcagtctctcctaccacaaacagcacagctccatttggcctgaagcctcgatcagtgtttctaagacctcagagaaatttggaatctatagacccgcagtttacaatccggaggaaaatggagcagatgagagaagagaaagagctggtggaacaacttcgtgagagcattgagatgagattgaaggtcagtctacacgaagacctgggggcagccctcatggatggtgtcgtcctctgccatctggtcaaccacatccgcccacggtcggttgcaagcatccatgtcccatcaccagcggttcccaaacttagcatggccaaatgcagaagaaatgtggaaaactttttggaagcgtgccgaaaattaggagtaccagaggaaaagctatgtctcccccaccacatccttgaagaaaaaggcctggtcaaagtgggcattaccattcaagcattactagacatcaccgtaacgaaggctctgttcacatgaaactaccccttctccattgggggctcagactctgctctcatccaggatcctgaactctgctccaggcacctgttcaaccctctctcccacccactgcctgtcacttcactgactccagttacattgaaacaattttcagtctaagggaggattttctacctttcagagctgacctccgactttaagacttgacaggtatttatcttgaaaccagagagggagctggaggaaaaaaaaactgagcagcacatcaatgccttttccaccctccttcatcctttccacactcaccgactgccattaccaaaacgccaagcacaaccgttttgcagcaagacgcattcgttttattaaaaccaaactcattatgtatttagtggggggaggggggcacaatcaggtttttcaccaccaaatttttcgagaggtttcttgagaccattgccttttaaaaaactattttcgacatacaaaatatttatataaatattatttattagtgagttgttattcatcctttggatgcaaattgtaaattaggaaactattttattactgcttttttgtggttaaacactttattttaatataaatgttgagttattttctatcctctttggtgtgcggtagtttaggtctcagtaatgtttctggtatatatgattccaaaaaaaagcgaaaaacaggtgcttttaggacacaacttttctggggaggcaatattgacactttggtttgtggaacgttggtcttatttatatttctgcattccatccagtttcctacattccagcagccctctgtcccccaatataatgaactgactaaaatcaagagagcaccccaaagttatttgtaaatagctgtgatggaaaaaaaaaa

SEQ ID NO: 537 - DNA, 1175 bp, Homo sapiens
  CDS (113)..(664)
gctctcacactaagtgaagcttctccattctgtaagctttccgggaacatccaaggcaagactggcacccagcacagcagtgactgaccacataccccactctccaggacccatggagtccttcagctcaaagagcctggcactgcaagcagagaagaagctactgagtaagatggcgggtcgctctgtggctcatctcttcatagatgagacaagcagtgaggtgctagatgagctctaccgtgtgtccaaggagtacacgcacagccggccccaggcccagcgcgtgatcaaggacctgatcaaagtggccatcaaggtggctgtgctgcaccgcaatggctcctttggccccagtgagctggccctggctacccgctttcgccagaagctgcggcagggtgccatgacggcacttagctttggtgaggtagacttcaccttcgaggctgctgttctggctggcctgctgaccgagtgccgggatgtgctgctagagttggtggaacaccacctcacgcccaagtcacatggccgcatccgccacgtgtttgatcacttctctgacccaggtctgctcacggccctctatgggcctgacttcactcagcaccttggcaagatctgtgacggactcaggaagctgctagacgaagggaagctctgagagccctgagcctagcacattccaccttgacaaaatggttgactgagaaaacacagataatgggcttcctaaccctgctcacctggcactaacacttttcaatcttcaggcttcattccttcccaagagtgcttttgactctgagaccagcccacccccaaacagctagtggagaaggagcaatgctgaggggtgaggcctctctcccactccagccccaggacaggaaacagaactgcctgaaaaaggtgaagtgaaacttggatctctatttctcccataagggacttctgaaacagggaagccccctcccatgtgaaccaaggaaaggaggcacagcccagagaacccctttggggatactaaagacagaagaggggaaggtggcccttagagacagagcttggacagatgccagaggctctgttccagagtgcaggaagaaggggctagggcaggggagattctcataggggaaataaaactactaaaatatgaaaaaaaaaaa

SEQ ID NO: 538 - DNA, 3990 bp, Homo sapiens
  CDS (563)..(3784)
tctttcccaataatacagtgaagggagtggaggattccataagcaatggccaggcacatattcatgtggtaggagtaaaacggagggctataccacttcccattcagatgtactatcagcagcaaccagtttctacttctgttgttcgtgttgattctgttcctgatgtatctcctgctccttcacctgcaggaatccctcatggatcacaaaccataggaaaccattttcagaggactcctgttgccaaccaatcttcaaatctgactgcaacacaaatgtcttttcctgtacaaggtgttcatactgtggcacaaactgtttcaagaattccacaaaatccttcacctcatacccaccagcaaccaaatgctccagtgactgtcattcaaagtaaagctccaattccttgtgaagttgttaaggctacagttatccagaattccataccccagacaggagttcctgttagtattgctgttggaggaggacctccacagagttctcttgttcagaatcatagtacagggccacaacctgttacagttgtgaattctcagacatgcttcaccatccatctgtaattccacagcagtctccattacacacaggggtaccaggacagatcccttcaggcactcctgttacagtaattcaacaagctgtcccacagagtcatatgtttggcagagtacagaacataccagcatgtacttctacagtttcacagggtcaacagttaatcaccacatcaccccaaccggtgcaaacttcatctcaacagacatcagctggtagccagtcacaagatactgttatcatagcacccccacagtatgtaacaacttctgcatccaatattgtctcagcaacttcagtacagaattttcaggtagctacaggacaaatggttactattgctggtgtcccaagtccacaagcctcaagggtagggtttcagaacattgcaccaaaacctctcccttctcagcaagtttcatctacagtggtacagcagccaattcaacaaccacagcagccaacccaacaaagcgtagtgattgtaagccagccagctcaacaaggtcatacttatgcaccagccattcaccaaattgttcttgctaatccagcagctcttccagctggtcagacagttcagctaactggacaacctaacataactccatcttcttcaccatcacctgtcccagctactaataaccaagtccctactgccatgtcgtcgtcctctacccctcaatcacagggaccacctcctactgtcagtcaaatgttatctgtgaaaaggcagcaacagcagcaacattcaccagcacccccaccacagcaggtacaagtacaagttcagcagccccaacaagtacagatgcaagttcaacctcaacagtcgaatgcaggagttggtcagcctgcctctggtgagtcgagtctgattaaacagcttctgcttccgaaacgtggtccttcaacaccaggtggtaagcttattctcccagctccacagattcctccccctaataatgcaagagctcctagccctcaggtggtctatcaggtggccagtaaccaagccgcaggttttggagtgcaggggcaaactccagctcagcagctattggttgggcagcaaaatgttcagttggtcccaagtgcaatgccaccctcagggggagtacaaactgtgcccatttcgaacttacaaatattgccaggtccactgatctcaaatagcccagcaaccattttccaagggacttctggcaaccaggtaaccataacagttgtgccaaatacgagttttgcacctgcaactgtgggtcagggaaatgcaactcagctcattgctccagcaggaattaccatgagcggaacgcagacaggagttggacttccagtacaaacgcttccagccactcaagcatctcctgctggacaatcatcatgtactactgctactcccccattcaaaggtgataaaataatttgccaaaaggaggaggaagcaaaggaagcaacaggtttacatgttcatgaacgtaaaattgaagtcatggagaacccgtcctgccgacgaggagccacaaacaccagcaatggggatacaaaggaaaatgaaatgcatgtgggaagtcttttaaatgggagaaagtacagtgactcaagtctacctccttcaaactcagggaaaattcaaagtgagactaatcagtgctcactaatcagtaatgggccatcattggaattaggtgagaatggagcatctgggaaacagaactcagaacaaatagacatgcaagatatcaaaagtgatttgagaaaaccgctagttaatggaatctgtgattttgataaaggagatggttctcatttaagcaaaaacattccaaatcataaaacttccaatcatgtaggaaatggtgagatatctccaatggaaccacaagggactttagatatcactcagcaagatactgccaaaggtgatcaactagaaagaatttctaatggacctgtattaactttgggtggttcatctgtgagcagtatacaggaggcttcaaatgcggcaacacagcaatttagtggtactgatttgcttaatggacctctagcttcaagtttgaattcagatgtgcctcagcaacgcccaagtgtagttgtctcaccacattctacaacctctgttatacagggacatcaaatcatagcagttcccgactcaggatcaaaagtatcccattctcctgccctatcatctgacgttcggtctacaaatggcacagcagaatgcaaaactgtaaagaggccagcagaggatactgatagggaaacagtcgcaggaattccaaataaagtaggagttagaattgttacaatcagtgaccccaacaatgctggctgcagcgcaacaatggttgctgtgccagcaggagcagatccaagcactgtagctaaagtagcaatagaaagtgctgttcagcaaaagcaacagcatccaccaacatatgtacagaatgtggtcccgcagaacactcctatgccaccttcaccagctgtacaagtgcagggccagcctaacagttctcagccttctccattcagtggatccagtcagcctggagatccaatgagaaaacctggacagaacttcatgtgtctgtggcagtcttgtaaaaagtggtttcagacaccctcacaggttttctaccatgcagcaactgaacatggaggaaaagatgtatatccagggcagtgtctttgggaaggttgtgagccttttcagcgacagcggttttcttttattacccacttgcaggataagcactgttcaaaggatgccctacttgcaggattaaaacaagatgaaccaggacaagcaggaagtcagaagtcttctaccaagcagccaactgtagggggcacaagctcaactcctagagcacaaaaggccattgtgaatcatcccagtgctgcacttatggctctgaggagaggatcaagaaaccttgtctttcgagattttacagatgaaaaagagggaccaataactaaacacatccgactaacagctgccttaatattaaaaaatattggtaaatattcagaatgtggtcgcagattgttaaagagacatgaaaataacttatcagtgctagccattagtaacatggaagcttcctccacccttgccaaatgcctttatgaacttaattttacagttcagagtaaggaacaagaaaaagactcagaaatgctgcagtgaaaaataattccacttacacagtgggggactcaaagtcagccacatttcacatactgttactgaagaaagcaccaagtcttaatggaacaaagaccatagaatgaattattttatctcctcccatgatgctgagaggaagcttcgtattctgatctctgagtgaatccctttgttctctgtttaaaaaaatctaaaaaaaaaaa

SEQ ID NO: 539 - DNA, 2003 bp, Homo sapiens
  CDS (364)..(1536)
  misc_feature (1)...(2003): n = a,t,c or g
gaaaacaaaaacaatcggccgcgccgtcgcaggcacccgaacgtcgcgagcggggcctggggacgcggggccgagtgcagcgagcgaacgggagcagcggcgactcgccagtggggctagggcgccatggtggcatggctggggctcctgtgctgcgctgtggtgctccccctgtgctgcctgcggctagtgcgccctgcctgcctctgtgcctgcctcatgcctccctgctgcctgccctgctttggtgtgaactgatgggagcagtgacgctggcnctcggctggtggccctgtggcctgaactggcttgcgggacaccttgggcggcctgagtgatgccgagctgccgccgcctccgtgcatggatcagtgcgtgacggtggagcgcgagctggagaaggtgctgcacaagttctcaggctacgggcagctgtgcgagcgcggcctggaggagctcatcgactacaccggcggcctcaagcacgagatcctgcagagccacggccaagatgctgaattatcagggacactttcacttgttttgacacagtgctgtaaaagaataaaggatactgttcaaaaattggcctccgaccacaaagacatccacagcagtgtttctcgggttggaaaagccattgataagaattttgattctgacattagcagtgtgggaatagatggctgctggcaggcagacagccaaaggcttctcaatgaagtgatggtggagcacttctttcgacaaggaatgctggatgtggctgaggagctctgtcaggaatctggtctttctgtagacccaagtcagaaggaaccatttgtggagttaaatagaatattagaggcattaaaggtcagagttctgagacctgctctggagtgggcagtgtcaaaccgggaaatgcttatagctcaaaacagctccttggaatttaagctacacagactgtattttattagcttgttaatgggtggaaccacaaatcagcgagaggcattacaatatgctaaaaattttcagccatttgccctaaatcatcaaaaagacattcaggttttgatgggaagccttgtgtacctgagacaagggattgagaactcaccatatgttcacctacttgatgcaaaccagtgggctgatatctgtgacatctttacacgggatgcttgtgccctcctggggctctccgtggagtcccctctcagtgtcagtttctcagcaggttgtgtggcgctgccagctttaattaacatcaaagccgtgattgaacagaggcagtgtactggagtttggaaccagaaagatgaattacctattgaagtggaccttggtaaaaagtgctggtatcactctatatttgcctgccccattcttcgtcagcaaacaacagataacaatccacccatgaaattggtctgtggtcatattatatcaagagatgccctgaataaaatgtttaatggtagcaaattaaaatgtccctactgtccaatggaacaaagtccaggagatgccaaacagatatttttctgaagagataactttagtttgcaatttgtaagtgaaactgaatcgtgggtgcatttcagaagagaacgttccatataatgcagctaaccaaggactcctgtgtttctataagctaatgctccagaaactttgccaacctgttagtgtacacacactgaggggagtgctcccggtgaatattatcatagggctttattatattcttggtcttcatttctgatcaagtaaatacaccagcagttgtcattcaatgcaggtttttgtacttaattatatggtgatttttttactttttaagagcagaaacggaaattgacctccccgccatgtgtttaatattcctcctgcttttacttttgtcattttcttgataatcgtaagccttgagagtgtttgtgaaaaagttttatttcctgttatgtatacataattaaatgaaaattcttcagaaaaagttaaaaaaaaaa

SEQ ID NO: 540 - DNA, 2357 bp, Homo sapiens
  CDS (88)..(1173)
gaggcattacagcgaagtggccgagctggcaggacttcttcaggaaaatgctttcggatctatagtaaagattttgggaaccagtgtatgcctgaccatgtgatccctgaaattaagagaactagtttgacatctgtagttctgaccttaaagtgccttgccatacacgatgtcataaggtttccctatttggatccacctaatgagagacttattttagaagctcttaaacaactttaccagtgtgatgctattgacaggagtggccatgtcaccagattgggtttgtctatggtggagtttcctttgcctccacatctgacatgtgcagtaataaaagctgcttccctggattgtgaagatctactacttccaatagcagcaatgttgtctgtggaaaacgtcttcattagacctgttgatccagagtaccagaaggaagcagaacagagacatcgagaattggcagctaaagctggaggatttaatgactttgcaactttagctgtcatctttgaacaatgcaaatcaagtggagctccagcttcatggtgccaaaaacactggattcattggaggtgcttattttctgcatttcgtgtggaagctcaacttcgagaactaatcaggaagcttaaacagcaaagtgatttcccaaaagagacctttgaaggccctaaacatgaagtactacgaagatgtctttgtgcgggctatttcaaaaatgtagctcgaagatctgttgggagaacgttttgcacaatggatggtcgtggaagcccagttcacattcatccttcctcagcacttcatgaacaggaaaccaaacttgaatggatcatttttcatgaggtattggttaccaccaaagtctacgcaagaattgtatgcccaatccgttatgaatgggtaagagacttgttacccaagttgcatgaatttaatgcacatgatttgagcagtgtggcccgacgtgaagtgagagaagatgcaagaaggagatggacaaataaggaaaatgtaaagcagctaaaggatggaatatcgaaagacgtcttaaagaaaatgcaaagaagaaatgatgacaaatccatatctgatgcacgggctcgtttccttgagagaaagcagcagaggacccaggaccacagtgacacacgaaaggaaacaggctaaggtggtgaaccctccaattcaggaagtgggaaaaggagccaggaaatgtgcttctactttgccagttatttcagacagcactaccaagaggaggtggtcagcacttgttattggcctatgaactaaaagcaaatcaaagctcataaatcaaagctcatcagttcccataaatgcagttgtcaaagaaaagatttggttgccatagtcataagcaatgatacatgaaaccaatgaaagacagtacatgtaataatattttcctcagtacaattttgctggccttaactggtatcaaacgctgtcattgagatgttttcaaagaacattgagttgtatttaatcagcgtgtactccatttgcattgaagcattaaaaattatttttcttaaaatctctttaaggccttcttgttgctgttagaatagtgctatatatcaggtatgtgaccatttatttcagaaggctgaacataagaggtttctactcagcaatacttagatgtctaactgtttaattgctacagagctttatagatatttagagaaaagacttaatcaattagtaaataaaattgcctatggcaggattctttcttgaattaatattaatccttaaattgatttttctgggattatacaaattcctttttatataaaagtatattgtttaaaacagtagctatagccattaaccaaaggacagatgatatatatatatatgatatatatatatatataagttcttttttagctgtacctacgtacttatatcagcaccatgtatgtaggtgtgatagtactttcaaacagcgcctccacctggcctactctgttatttccacctgtttgggtagggccatttaacttccattatgccaaacttgggatgggattttcgaagcagacaacactatttcatcgtgtttcaaattggaaccttgaggctagttagtatcacactcaggccacactcagcacttgcccactcttgtttactgccttgtattctagttatttgtgtatttgtctccctcactagattatacgctccttgtgggcagggactgtgtcttttttcatctttgtatctttcatggacctagcatagtgctttgcacatagtagtcactcagtgtttgttaaataaagctattagtgtcattaaaattcaaaaaaaaaaaa

SEQ ID NO: 541 - DNA, 2182 bp, Homo sapiens
  CDS (391)..(1644)
ggcacgagggccaggtacccaggggtcagcccacattcactaagaaaaagaagaccatccgtttgttctggaatagaaattcggccttttgactggccatgtaaaaacaaccgacgctgcagagaattcctgtggtcaaaactggaacccattaaggtggacacttccagactggagcacctgtttgagtctaaatccaaggaactgtctgtctcaaagaaaactgctgcagatggaaaaaggcaagagatcattgttctggattccaagaggagtaatgccatcaatattggtctgacggtgctgccccctccaaggacgattaagatcgccattttgaattttgatgagtatgccttaaacaaagaaggaatcgagaaaattctaacgatgattcccaccgatgaggagaagcagaaaatccaggaagctcagctggccaaccctgaaatccccctgggcagtgcagagcagttcctcctcaccctgtcctccatcagcgagctctctgcacgacttcacctctgggcattcaaaatggattatgaaactacagaaaaggaagtagcagaaccactcctggacctgaaggaaggaatagaccagttggagaacaataaaaccttgggctttatcctgtctactctcttagccattgggaactttctaaatggaactaatgccaaagcgtttgagttaagctacctcgagaaggttccagaagtcaaagacacagtgcacaagcagtcgcttctccaccatgtgtgcaccatggtggtagaaaacttcccagacagctccgatctgtactcggagatcggggccatcaccaggtcagccaaggttgactttgatcaacttcaggataatttatgtcagatggagagaagatgcaaagcttcatgggatcacctcaaggcaattgcaaaacatgaaatgaaaccagttttaaaacaacggatgtcagagttcctgaaagactgtgcagagcgaattataattttaaagattgtccatagaaggataatcaacagattccactcctttttactctttatgggccatccaccttatgcaattcgggaagtgaacataaacaaattctgcaggattattagtgaatttgcactagagtatcgcacaaccagggaaagggttttgcagcagaaacagaaacgggccaaccacagagagagaaataagaccagagggaagatgatcaccgattctggcaagttctccggcagttctccggcgcccccaagccagccgcagggtctgagctatgcggaggacgcggctgagcacgagaacatgaaggctgtgctgaaaacctcgtccccctccgtggaggacgccacccccgcgctgggcgtccgcacacgcagccgagcaagccgaggatccactagttcctggactatgggaactgatgactcgcccaatgtcacagatgatgcagctgatgagatcatggaccgcatcgtcaagtcagccacccaagtgcccagtcagcgagtggtgccgagggagaggaaacgatcccgggccaaccggaaatctttgcgaagaaccctgaagagcggcctgaccccagaagaagccagagccctgggcttggttggcacctcggagttgcagctgtgacactcataggttactcccaggagtgtgctgagcagaaggcaagctcttgctggatgaaacccctccaggtggggttggggagacttgatattcacatccaacagtttgaaaagggagagctcaattcccagcgtcaccccatggcttgtgttgcctgctacgcattgacttggatctccaggagtcccctgcacataccttctccatcgtgtcagctgtgtttctcttgattccgtgacacccggtttattagttcaaaagtgtgacaccttttctgggcaaggaacagcccctttaaggagcaaatcacttctgtcacagttattatggtaatatgaggcaatctgattagcttcacagactgagtctccacaacaccaaaatatccagatgtaaaccccaaacttgtacacaaaagaaagcacagattgtttacctgttgtggattttagatgtaacaaatgtttatacaaatacatacatgtacaccatgtttcaaatactaaataaatagagtttaatgccaaaaaaaaaa

SEQ ID NO: 542 - DNA, 3818 bp, Homo sapiens
  CDS (708)..(3263)
  misc_feature (1)...(3818): n = a,t,c or g
cacgtcctgcctcgcttcgagacccacactgtgtatctgctcaccgtggcggctggctgtgtcagccccgccttagcgtctttttctcaaagccgtgtaaccgctgacaattctggtccgaggccaatccctgccctgacagtggagggatggttgcntccatctaaccgactcctgtaagctttggattcatgacggggtgaccatgacacggtgaggttacgaagaacatgcccaaccacttgtccagggcctgggtggcaggaaacctcggcttgggacggaaagggaatcatggttctcaaggcaggcatcattacttccgccacggtgggacagctgccctccctggagcctcaggatgtctctcttgctgactccaggggccatctttggagagtataggttttataaataagtcctgaaaccatgtcatcgcctatgtcgatgccacgattcacgaggccaccagaagagttgggcacccagtatgtcctcttcctagtcattttcagttcctgccaattcgggaggctctcctagagagcagcgcgaagccatggcttttgggcccggggacggaccgtagcgcgtagccggaagcggaggcgtggaggcgggtctgaggtttggtgactgcggggcaggccgggggcagctgtctgtctggctctttttgacagcccccagtgcgaaaggctgccagcatgtcatcagtgagccccatccagatccccagtcgcctcccgctgctgctcacccacgagggcgtcctgctgcccggctccaccatgcgcaccagcgtggactcggcccgcaacctgcagctggtgcggagccgccttctgaagggcacgtcgctgcaaagcaccatcctgggcgtcatccccaacacgcctgaccccgccagcgacgcgcaggacctgccgccgctgcacaggattggcacagctgcactggccgttcaggttgtgggcagtaactggcccaagccccactacactctgttgattacaggcctatgccgtttccagattgtacaggtcttaaaagagaagccatatcccattgctgaagtggagcagttggaccgacttgaggagtttcccaacacctgtaaaatgagggaggagctaggagaactatcagagcagttttacaaatatgcagtacaattggttgaaatgttggatatgtctgtccctgcagttgctaaattgagacgtcttttagatagtcttccaagggaagctttaccagacatcttgacatcaattatccgaacaagcaacaaagggaaactccagattttagatgctgtgagcctagaggagcggttcaagatgactataccactgcttgtcagacaaattgaaggcctgaaattgcttcaaaaaaccagaaaacccaagcaagatgatgataagagggttatagcaatacgccctattaggagaattacacatatctcaggtactttagaagatgaagatgaagatgaagataatgatgacattgtcatgctagagaaaaaaatacgaacatctagtatgccagagcaggcccataaagtctgtgtcaaagagataaagagactcaaaaaaatgcctcagtcaatgccagaatatgctctgactagaaattatttggaacttatggtagaacttccttggaacaaaagtacaactgaccgcctggacattagggcagcccggattcttctggataatgaccattacgccatggaaaaattgaagaaaagagtactggaatacttggctgtcagacagctcaaaaataacctgaagggcccaatcctatgctttgttggccctcctggagttggtaaaacaagtgtgggaagatcagtggccaagactctaggtcgagagttccacaggattgcacttggaggagtatgtgatcagtctgacattcgaggacacaggcgcacctatgttggcagcatgcctggtcgcatcatcaacggcttgaagactgtgggagtgaacaacccagtgttcctattagatgaggttgacaaactgggaaaaagtctacagggtgatccagcagcagctctgcttgaggtgttggatcctgaacaaaaccataacttcacagatcattatctaaatgtggcctttgacctttctcaagttctttttatagctactgccaacaccactgctaccattccagctgccttgttggacagaatggagatcattcaggttccaggttatacacaggaggagaagatagagattgcccataggcacttgatccccaagcagctggaacaacatgggctgactccacagcagattcagataccccaggtcaccactcttgacatcatcaccaggtataccagagaggcaggggttcgttctctggatagaaaacttggggccatttgccgagctgtggccgtgaaggtggcagaaggacagcataaggaagccaagttggaccgttctgatgtgactgagagagaaggttgcagagaacacatcttagaagatgaaaaacctgaatctatcagtgacactactgacttggctctaccacctgaaatgccgattttgattgatttccatgctctgaaagacatccttgggcccccgatgtatgaaatggaggtatctcagcgtttgagtcagccaggagtagcaataggtttggcttggactcccttaggtggagaaatcatgttcgtggaggcgagtcgaatggatggcgagggccagttaactctgaccggccagctcggggacgtgatgaaggagtccgcccacctcgctatcagctggctccgcagcaacgcaaagaagtaccagctgaccaatgcttttggaagttttgatcttcttgacaacacagacatccatctgcacttcccagctggagctgtcacaaaagatggaccatctgctggagttaccatagtaacctgtctcgcctcactttttagtgggcggctggtacgttcagatgtagccatgactggagaaattacactgagaggtcttgttcttccagtgggtggaattaaagacaaagtgctggcggcacacagagcgggactgaagcaagtcattattcctcggagaaatgaaaaagaccttgagggaatcccaggcaacgtacgacaggatttaagttttgtcacagcaagctgcctggatgaggttcttaatgcagcttttgatggtggctttactgtcaagaccagacctggtctgttaaatagcaaactgtaggtccaaatctcaattttttagaattttaagttatgaagtgctcaaaggtactgacacagttgattttattcacaccattaggggtatgcaagatgtccctgttttataaacataatcacaacagtaataaacctcaagtagtggctagtgtttagtatagaaatataagatgttgatttagtaaactgataaaaatcgaattcttgtctttttagtgggatccttactgtccctggaaagatatagcatagtggttctcagcacagtctccagaacagaagcatctgtagtatctggtaacttgttgcaatgtacattcttcaggctccacagcaggccgcctgaatcaaatcctgggaggtggggacagaaatctgggttttaagaagccttccaggtaattctgctgcacactcaagttcaggaacgcaccggtatagaccattaccttagtggatttacctgtagagtttattggatcctgaaaccaatcaattacttagaactaggcaaagatgaaagtatagccaactattcttggctatatatata

SEQ ID NO: 543 - DNA, 1938 bp, Homo sapiens
  CDS (127)..(1806)
atttaaggggcgggttaattaggaacactcgttaactgggggacctctttgaggcttttttccttcttttaaaaaaacattttagataattcttcttttcaagcaaaatcttatttagaaaaaataatgccccaccccccccgaaattcagatcaagaagaacttctcgatgaggagattaatgaagatgaaatcttggccaacttgtctgctgaagaactgaaagaactgcagtcggaaatggaagtcatggcccctgaccccagccttcccgtgggaatgattcagaaagatcaaactgacaagccaccgacaggaaacttcaatcataaatctcttgttgattatatgtattgggaaaaggcatccaggcgcatgctggaagaggaacgagttcctgtcacctttgtgaaatccgaggaaaagactcaagaagagcatgaagaaatagaaaaacgtaataaaaatatggcccagtatttaaaagaaaagctcaataatgaaatagttgcaaataaaagagaatcaaagggcagcagcaatatccaagaaacagatgaagaagatgaagaagaagaagatgatgatgatgacgacgaaggagaagatgatggtgaagagagtgaagaaacgaacagagaagaggaaggcaaagcaaaggaacaaattagaaattgtgagaacaactgccagcaggtaactgacaaagcattcaaagaacagagagacagaccagaggcccaagaacaaagtgagaaaaaaatatcgaaattagatcctaagaagttagctctagacaccagctttttgaaggtaagtacaaggccttcaggaaaccagacagacctggatgggagcttgaggagagttaggaaaaatgatcctgacatgaaggaactcaacctgaacaacattgaaaacatccccaaagaaatgttactggactttgtcaatgcaatgaagaaaaacaagcacatcaaaacattcagtttagccaatgtgggtgcagatgagaatgtagcatttgccttggctaacatgttgcgtgaaaatagaagcatcaccactctcaacatcgagtccaatttcatcacaggtaaagggattgtggccatcatgaggtgtctccagtttaatgagacgctaactgagcttcggtttcacaatcagaggcacatgttgggtcaccatgctgaaatggaaatagccaggcttttgaaggcaaacaacactctcctgaagatgggctaccattttgagcttccgggtcccagaatggtggtcactaatctgctcaccaggaatcaggataaacaaaggcagaaacgacaggaagagcaaaaacagcagcaactcaaggaacagaagaagctgatagccatgttagagaatgggttggggctgccccctgggatgtgggagctgttgggaggacccaagccagattccagaatgcaggaattcttccagccaccgccacctcggcctcccaacccccaaaatgtcccctttagtcaacgcagtgaaatgatgaaaaagccatcgcaggccccgaagtacaggacagaccctgactccttccgggtggtgaagctgaagagaatccagcgcaaatctcggatgccggaagccagagaaccacccgagaaaaccaacctcaaagatgtcatcaaaacgctcaagccagtgccgagaaacaggccacccccattggtggaaatcactcccagagatcagctgctaaacgacattcgtcacagcagtgtcgcctatcttaaacctgtgcaactgccaaaagaactggcgtaagaggcaacagagccatctagaagaacaagaaatggaaatagtgactcttggattacagcatggagactatgtcagcagcaatactttaggatccacgtggcagaactggaaacaatgctaccatctgat

SEQ ID NO: 544 - DNA, 1193 bp, Homo sapiens
  CDS (47)..(499)
aaggttctgggaagtaggagaccccactggctttggtcccctaagaatggactctgctgcctgtgctgctgctgccacccctgttccagccctggctttggccctagctccagacctagcacaagccccactggcactccctggcctgttaagcccatcttgccttctctcctctggacaagaagtaaatgggagtgaaagaggaacttgtctctggaggccctggctgtcttccacaaatgactccccaaggcagatgaggaagctggtggatttggctgctggtggggcaacggctgctgaggtcaccaaggctgaatccaagttccatcaccctgtcaggctcttctggcctaaatcccgctccttcgactatctgtacagtgctggggagattttactgcagaactttcctgtccaggcaaccatcaacctatacgaggactcagacagcgaagaagaagaggaagatgaagagcaggaggatgaagaagagaagtaggaggccaatgaaaaggggccagaagggtgtgtgagggtaccagggtccataccctacagcgccacagctcatcccccttcctcacccctaacctatccaaatggaggcagccagagtctgattggggttcagtttgtctggcaagttttcacagacatcagttagccggaagtattagtccagcagatagagctttctggactgaaaattgggtcatctagctgcccagctcaccctggcttacctgaatggcctgtgagctcaggcctcttgcatctcattgtctgggctgctgttgtgttgaccatgggagggttctaggagctctagaaggaaggcttgctgaagcccccaggaagcagagcagggcagggaatgcccttgtggagggaagtagtcattcctcaggccctttgactccctagccttcccaggtggccatgtagtcccgtctctctgtggaaagcctgacttctggcttcaccccaaggaataccaacagcagatccatgcaaggttggggtgcctttttgatgagtcttacaggaagggaaggcagtgtgtagagaatcggcttgctctggggatgcctccccattttgcctgctgtccattgaagtctgtgtgttggcatgagatgaatcaggagaaaaataaactggatggtgttttcctttttaaaaaaaaaaaa

SEQ ID NO: 545 - DNA, 2669 bp, Homo sapiens
  CDS (44)..(1621)
ggacggtggcgggggtaacactggcgcgggtggggggccggggatgggcctgagcctgggcctgggtctgggtctgagcctaggcatgagtgaggccaccagtgaggcagaggaggaggcggccacggccgaggcggtgggacgcctggccacgacgctgtggctgcggctccgcggctgggaggcggtgctggcggcggcgcagcggttgctggtgtgggagaagccgctgcacagcctggtcacggcggccgcgctcaacggcctcttctggttgctgtcttcctcgtccctccggcccttcttcctactcagcgtctcacttttggcctattttctgctggatctctggcagcctcgctttctccctgacgtttcagcatcatccccagaggagccacactctgacagtgagggtgcggggtcaggcgcccggccgcacctgctgagtgtgcccgagttgtgcagatacctggctgagagctggctcaccttccagattcacctgcaggagctgctgcagtacaagaggcagaatccagctcagttctgcgttcgagtctgctctggctgtgctgtgttggctgtgttgggacactatgttccagggattatgatttcctacattgtcttgttgagtatcctgctgtggcccctggtggtttatcatgagctgatccagaggatgtacactcgcctggagcccctgctcatgcagctggactacagcatgaaggcagaagccaatgccctgcatcacaaacacgacaagaggaagcgtcaggggaagaatgcacccccaggaggtgatgagccactggcagagacagagagtgaaagcgaggcagagctggctggcttctccccagtggtggatgtgaagaaaacagcattggccttggccattacagactcagagctgtcagatgaggaggcttctatcttggagagtggtggcttctccgtatcccgggccacaactccgcagctgactgatgtctccgaggatttggaccagcagagcctgccaagtgaaccagaggagaccctaagccgggacctaggggagggagaggagggagagctggcccctcccgaagacctactaggccgtcctcaagctctgtcaaggcaagccctggactcggaggaagaggaagaggatgtggcagctaaggaaaccttgttgcggctctcatcccccctccactttgtgaacacgcacttcaatggggcagggtccccccaagatggagtgaaatgctcccctggaggaccagtggagacactgagccccgagacagtgagtggtggcctcactgctctgcccggcaccctgtcacctccactttgccttgttggaagtgacccagccccctccccttccattctcccacctgttccccaggactcaccccagcccctgcctgcccctgaggaagaagaggcactcaccactgaggactttgagttgctggatcagggggagctggagcagctgaatgcagagctgggcttggagccagagacaccgccaaaaccccctgatgctccacccctggggcccgacatccattctctggtacagtcagaccaagaagctcaggccgtggcagagccatgagccagccgttgaggaaggagctgcaggcacagtagggcttcctggctaggagtgttgctgtttcctcctttgcctaccactctggggtggggcagtgtgtggggaagctggctgtcggatggtagctattccaccctctgcctgcctgcctgcctgctgtcctgggcatggtgcagtacctgtgcctaggattggttttaaatttgtaaataattttccatttgggttagtggatgtgaacagggctagggaagtccttcccacagcctgcgcttgcctccctgcctcatctctattctcattccactatgccccaagccctggtggtctggccctttctttttcctcctatcctcagggacctgtgctgctctgccctcatgtcccacttggttgtttagttgaggcactttataatttttctcttgtcttgtgttcctttctgctttatttccctgctgtgtcctgtccttagcagctcaaccccatcctttgccagctcctcctatcccgtgggcactggccaagctttagggaggctcctggtctgggaagtaaagagtaaacctggggcagtgggtcaggccagtagttacactcttaggtcactgtagtctgtgtaaccttcactgcatccttgccccattcagcccggcctttcatgatgcaggagagcagggatcccgcagtacatggcgccagcactggagttggtgagcatgtgctctctcttgagattaggagcttccttactgctcctctgggtgatccaagtgtagtgggaccccctactagggtcaggaagtggacactaacatctgtgcaggtgttgacttgaaaaataaagtgttgattggctagaactcgccagaacctgtcttcctgaaaaaccaaaaaaccctggagcgcggcccctgttaaaagaaaacaattttgctcccgcggctccgcgaagcgattattttttttgaggccacagaaaatatgtacacgcggcggggttccacggctcgagaagggaaaaccccggtgcgacccccgttcg

SEQ ID NO: 546 - DNA, 3953 bp, Homo sapiens
  CDS (254)..(3349)
cggagtagacgttagccatggaaaccgagagctggcccgggcggggccgcggtgagctcgttattcggccgccgcagcttttctgcctccgcattcgggcactaaccaacctcccggcgggagcgcccagcccgagtttacctgcaaaaatgcggtccctgggatgccttcgcgtcttctcttccctcgggtgacttgagaaactgctgtgttacagaaaagcatgtgactttcagaataatcccgagtgaggatgagtccagatgtgcctctactgaatgattacaagcaggacttctttctgaagcgctttccacagactgttcttggaggccctcgattcaaattaggctattgtgcccctccttacatatatgttaatcaaattattctttttctaatgccatgggtttggggtggagtcggaacacttttataccagttaggcatcctgaaagactattatacagcagcactttcaggtggattaatgctttttactgcatttgtcatccagttcacaagtttatacgccaaaaacaaatcaacaacagtagaaagaatactaaccacggatatcttagcagaggaggatgagcatgaatttaccagttgtactggtgctgagactgtcaaatttctcattcctggcaagaaatatgtagccaatacagtttttcattctattcttgctggattagcgttattagtaatgttcatcatgtctgctggaacagctatagcatcatatttcattccaagcactgttggtgtggttcttttcatgactggatttggtttcttgctgagtctgaacttaagtgatatgggtcacaaaattggaaccaaatctaaggatttacccagtggtccagaaaaacatttttcatggaaggaatgccttttctacatcattatattagtcttggctcttttagaaactagtttgcttcatcactttgctggcttctcacagatttctaaaagcaattcccaggctattgtgggctatggtttgatgatattacttataatactgtggatacttagagaaattcaaagcatatatatcattggaattttccgaaatcccttttatccgaaggatgtgcaaactgtgactgtattctttgagaagcaaactaggctcatgaagattggtattgtcagacggattttgctaactttagtatcaccttttgccatgatagcatttctttcattggacagttccttacaagggctccactcagtgtctgtctgtattggattcacaagagcctttagaatggtatggcagaatacagaaaatgctttattggagacagtcattgtatcaacagtacacttgatctccagtacagacatatggtggaacagaagcctggatacaggactcagactcttactggttggtatcatacgtgatcgtttgattcagttcatctctaaattgcagtttgccgtgactgtgcttttgacatcatggacagagaaaaaacaacgtcgaaaaacaactgccactttatgtatactcaacattgtcttttctccattcgtgttggtcatcatagttttttctacactactctcttctcccttactccctcttttcacccttcctgtgttcttggtggggtttccccgacctattcagagttggccaggagcagcaggcaccacagcctgtgtgtgtgcagatacagtgtactactaccaaatggtgcccaggttgactgctgtactgcagactgcaatggcagctggaagtttaggtctcctcctacctggatctcattacttgggccgttttcaggatcgtttaatgtggataatgattctggaatgtggctatacttactgctctattaacattaaggggttagaattgcaggaaacatcctgtcatactgcagaagctcgcagagttgatgaagtttttgaagatgcttttgagcaagaatacacaagagtatgttcccttaatgaacactttggaaatgtcttgacaccctgtactgttttgcctgtgaaattgtattctgatgccaggaatgttctatcaggcataattgattctcatgaaaacttaaaagaatttaaaggtgacctcattaaagtacttgtgtggatacttgttcaatactgctccaaaaggcctggcatgaaagagaatgttcacaacactgaaaataaagggaaagcacctctaatgttgcctgctttgaacactttgccacctcccaaatccccagaagacatagacagtttaaattcagaaacttttaatgactggtctgatgataatatttttgatgatgagccaactatcaaaaaagtaatagaagaaaaacatcagttgaaagatttgccaggtacaaatttgtttattccaggatcagtagaatcacagagggttggtgatcattctacaggcactgttcctgaaaacgatctttacaaagcagttctattaggataccctgctgttgacaaaggaaaacaagaggacatgccatatattcctctcatggagttcagttgttcacattctcacttagtatgcttacccgcagagtggaggactagctgtatgcccagttccaaaatgaaggagatgagctcgttatttccagaagactggtaccaatttgttctaaggcagttggaatgttatcattcagaagagaaggcctcaaatgtactggaagaaattgccaaggacaaagttttaaaagacttttatgttcatacagtaatgacttgttattttagtttatttggaatagacaatatggctcctagtcctggtcatatattgagagtttacggtggtgttttgccttggtctgttgctttggactggctcacagaaaagccagaactgtttcaactagcactgaaagcattcaggtatactctgaaactaatgattgataaagcaagtttaggtccaatagaagactttagagaactgattaagtaccttgaagaatatgaacgtgactggtacattggtttggtatctgatgaaaagtggaaggaagcaattttacaagaaaagccatacttgttttctctggggtatgattctaatatgggaatttacactgggagagtgcttagccttcaagaattattgatccaagtgggaaagttaaatcctgaagctgttagaggtcagtgggccaatctttcatgggaattactttatgccacaaacgatgatgaagaacgttatagtatacaagctcatccactacttttaagaaatcttacggtacaagcagcagaacctcccctgggatatccgatttattcttcaaaacctctccacatacatttgtattagagctcattttgactgtaatgtcatcaaatgcaatgtttttattttttcatcctaaaaaagtaactgtgattcttgtaacttgaggacttctccacacccccattcagatgcctgagaacagctaagctccgtaaagttggttctcttagccatcttaatggttctaaaaaacagcaaaaacatctttatgtctaagataaaagaactatttggccaatatttgtgccctctggactttagtaggctttggtaaatgtgagaaaacttttgtagaattattatataatgaattttgtaatgctttcttaaatgtgttataggtgaattgccatacaaagttaacagctatgtaatttttacatacttaaaagataaacatatcagtgttctaagtagtgataatggatcctgttgaaggttaacataatgtgtatatatttgtttgaaatataatttatagtattttcaaatgtgctgatttattttgacatctaatatctgaatgtttttgtatcaagtagtttgttttcatagacttcaattcataaactttaaaaaacttttaataaaatattttccttccttttcaaaaaaaaaaaaa

SEQ ID NO: 547 - DNA, 678 bp, Homo sapiens
  CDS (59)..(556)
ctcaggcaaccgatattgctgattagcctgttaagcaggatattcattgcaactcaccatggctcacaccaggtcatacttcatgctgaactcctgcctgatgttcctgcctcagagcctaggtcaaaaggcccagacagaggtgcccaaggcccggatcaactgcccaaaaagcaccactgcctatcgctcctactgctactactttagtgactaccgtgagacctggagtgatgcctatctctattgccagaacatgaattcgggcaacctggtgtctgtgctcacccaggccgagggtgcctttgtggcctcactgattaaggagagtggcactgatgacttcaatgtctggattggcctccatgaccccaaaaagaaccgccgctggcactggagcagtgggtccctggtctcctacaagtcctggggcattggagccccaagcagtgttaatcctggctactgtgtgagcctgacctcaagcacaggattccagaaatggaaggatgtgccttgtgaagacaagttctcctttgtctgcaagttcaaaaactagaggcagcctggaaatacatggtctagacctgttcagcgattacaaccgggtcaatatttaaaccggacctttctccacctcaactcaaccggacattctcttttcttgcgagttggcct

SEQ ID NO: 548 - DNA, 1069 bp, Homo sapiens
  CDS (134)..(928)
tcggcacgaggcttctttcagtacattttcctgttagactcggggtattagagacccaaagatacccaaggaggagtgagagcgtccctgccttcgaggagcagacagggcaccgcgaggcgtttgcctcagcatggagggcggggccgcggcagccacccccacagcactgccttactacgtggccttctcccagctgctgggcctgaccttggtggccatgaccggcgcgtggctcgggctgtaccgaggcggcattgcctgggagagcgacctgcagttcaacgcgcaccccctctgcatggtcataggcctgatcttcctgcagggaaatgccctgctggtttaccgtgtcttcaggaacgaagctaaacgcaccaccaaggtcctgcacgggctgctgcacatctttgcgctcgtcatcgccctggttggcttggtggcggtgttcgactaccacaggaagaagggctacgctgacctgtacagcctacacagctggtgcgggatccttgtctttgtcctgtactttgtgcagtggctggtgggcttcagcttcttcctgttccccggagcttcattctccctgcggagccgctaccgcccacagcacatcttctttggtgctaccatcttcctcctttccgtgggcaccgccctgctgggcctgaaggaggcactgctgttcaacctcgggggcaagtatagcgcatttgagcccgagggtgtcctggccaacgtgctgggcctgctgctggcctgcttcggtggggcggtgctctacatttggccgggcgctggagcggggtccccaggggaaaaacacgcccctccaggggtcaagagcctacggggagaatcgcgggcccctatatgccccgcggcgcagggtacccgaggggggtcttctggccccccagggaggtcataacagagcacccaataggtttgcacacaggcagggtacagacaactaaagaggatttggagagagagacacagagaatgacgtagaaaaaacaaatagtgaggcgattactgccacaacaacgaatagatatgaggaaag

SEQ ID NO: 549 - DNA, 2535 bp, Homo sapiens
  CDS (219)..(2159)
tttcgtgttgggtacccgagagacccggcggtggggaagtcacttcctcccgaagacgctgtttcctagcaaccgccctccgcctctgttattagcccctcctcctcgctcggaccaggaccggctctgcgggcgccgccaggcccagaccaagctactatcagaaggtgaattctaataattagctattttataaaggtaacgagaaaaaatacactatgtctgatgaagtttttagcaccactttggcatatacaaagagtccaaaagttaccaaaagaactactttccaggatgagctaataagagcaattacagctcgctcagccagacaaaggagttctgaatactcagatgactttgacagtgatgagattgtttctttaggtgatttttctgacacttcagcagatgaaaattcagttaataaaaaaatgaatgactttcatatatcagatgatgaagaaaagaatccttcaaaactattgtttttgaaaaccaataaatcaaacggtaacataaccaaagatgagccagtgtgtgccatcaaaaatgaagaggaaatggcacctgatgggtgtgaagacattgttgtaaaatctttctctgaatctcaaaataaggatgaggaatttgaaaaagacaaaataaaaatgaaacctaaacccagaattctttcaattaaaagcacatcttcagcagaaaacaacagccttgacacagatgatcactttaaaccatcaccttggccaaggagtatgttaaaaaagaaaagtcacatggaggagaaggatggactagaagataaagaaactgccctcagtgaagaattggagttacattctgcaccttcttcccttccaacgccgaatggcatacaattagaagctgagaaaaaagcattctctgaaaaccttgatcctgaggattcatgcttaacaagtctagcatcatcatcacttaaacaaattcttggagattctttttcaccaggatctgagggaaacgcatctggaaaagatccaaatgaagaaatcactgaaaaccataattccttgaaatcagatgaaaataaagagaattcattttcagcagaccatgtgactactgcagttgagaaatccaaggaaagtcaagtgactgctgatgaccttgaagaagaaaaggcaaaagcggaactgattatggatgatgacagaacagttgatccactactatctaaatctcagagtatcttaatatctaccagtgcaacagcatcttcaaagaaaacaattgaagatagaaatataaagaataaaaagtcaacaaataatagagcatccagtgcatctgccagattaatgacctctgagtttttgaagaaatctagttctaaaaggagaactccatcgacaactacctcttctcactatttagggactttaaaagtcttggaccaaaaaccttcacagaaacagagcatagaacctgatagagcagataacataagggcagctgtttatcaggagtggttagaaaagaaaaatgtatatttacatgaaatgcacagaataaaaagaattggaagtgaaaacttaaggatccaaaatgaacagaaaaaagctgctaaaagagaagaagcattagcatcatttgaggcctggaaggctatgaaagaaaaggaagcaaagaaaatagctgccaaaaagaggcttgaagaaaaaaacaagaagaaaactgaagaagaaaatgctgcaagaaaaggagaagcactacaagcttttgaaaaatggaaagagaaaaagatggaatatcttaaagagaaaaatagaaaggagagagaatatgaaagagcaaagaaacagaaagaggaggaaactgttgccgagaaaaagaaagataatttaactgctgttgagaaatggaatgaaaaaaaggaagcttttttcaagcaaaaaaaaaaaaaaaaaaaaaatgagaaaagaaaggaagaactgaaaagagctgagaaaaaagataaagataaacaagctattaatgaatatgaaaaatggctggaaaataaggaaaaacaagaaagaattgaacgaaaacagaagaaacgtcattcctttcttgaaagtgaggcacttcctccgtggagccctccaagcagaactgtgttcgcaaaagtgttttgataattctagttcttacattatttggttatttatcggtttgccaatattagccatagatttaaaaccattcaattatttatagttagaggaatatattttaattaaatgccagacactcctgctgacaatgaaagaaatactttggaatgtaatcagtgaaagcatttttttgaactgtagataaactgcctcaaacaaagacctaataatcagattgtttttaccattaagatacataagattttatcatgtcctgataattcttatggtggagtgattcatgatctttttcattaagctctgtatgttatttaagtatatttaattccagtaataaaaaggaaatcatctaggtaccataaaaaaaaaaaaa

SEQ ID NO: 550 - DNA, 2645 bp, Homo sapiens
  CDS (183)..(2477)
caactgattttaaactctacagagatgcctacttgtttctactatgtcttgtggcagttgctggcattgggtttatctacactattattaatagcattttaaatgaggtacaagttggggtcataattatcgagtctcttgatattatcacaattactgtgccccctgcacttcctgctgcaatgactgctggtattgtgtatgctcagagaagactgaaaaaaatcggtattttctgtatcagtcctcaaagaataaatatttgtggacagctcaatcttgtttgctttgacaagactggaactctaactgaagatggtttagatctttgggggattcaacgagtggaaaatgcacgatttctttcaccagaagaaaatgtgtgcaatgagatgttggtaaaatcccagtttgttgcttgtatggctacttgtcattcacttacaaaaattgaaggagtgctctctggtgatccacttgatctgaaaatgtttgaggctattggatggattctggaagaagcaactgaagaagaaacagcacttcataatcgaattatgcccacagtggttcgtcctcccaaacaactgcttcctgaatctacccctgcaggaaaccaagaaatggagctgtttgaacttccagctacttatgagataggaattgttcgccagttcccattttcttctgctttgcaacgtatgagtgtggttgccagggtgctgggggataggaaaatggacgcctacatgaaaggagcgcccgaggccattgccggtctctgtaaacctgaaacagttcctgtcgattttcaaaacgttttggaagacttcactaaacagggcttccgtgtgattgctcttgcacacagaaaattggagtcaaaactgacatggcataaagtacagaatattagcagagatgcaattgagaacaacatggattttatgggattaattataatgcagaacaaattaaagcaagaaacccctgcagtacttgaagatttgcataaagccaacattcgcaccgtcatggtcacaggtgacagtatgttgactgctgtctctgtggccagagattgtggaatgattctacctcaggataaagtgattattgctgaagcattacctccaaaggatgggaaagttgccaaaataaattggcattatgcagactccctcacgcagtgcagtcatccatcagcaattgacccagaggctattccggttaaattggtccatgatagcttagaggatcttcaaatgactcgttatcattttgcaatgaatggaaaatcattctcagtgatactggagcattttcaagaccttgttcctaagttgatgttgcatggcaccgtgtttgcccgtatggcacctgatcagaagacacagttgatagaagcattgcaaaatgttgattattttgttgggatgtgtggtgatggcgcaaatgattgtggtgctttgaagagggcacacggaggcatttccttatcggagctcgaagcttcagtggcatctccctttacctctaagactcctagtgtttcctgtgtgccaaaccttatcagggaaggccgtgctgctttaataacttccttctgtgtgtttaaattcatggcattgtacagcattatccagtacttcagtgttactctgctgtattctatcttaagtaacctaggagacttccagtttctcttcattgatctggcaatcattttggtagtggtatttacaatgagtttaaatcctgcctggaaagaacttgtggcacaaagaccaccttcgggtcttatatctggggcccttctcttctccgttttgtctcagattatcatctgcattggatttcaatctttgggttttttttgggtcaaacagcaaccttggtatgaagtgtggcatccaaaatcagatgcttgtaatacaacaggaagcgggttttggaattcttcacacgtagacaatgaaaccgaacttgatgaacataatatacaaaattatgaaaataccacagtgttttttatttccagttttcagtacctcatagtggcaattgccttttcaaaaggaaaacccttcaggcaaccttgctacaaaaattatttttttgttttttctgtgatttttttatatatttttatattattcatcatgttgtatccagttgcctctgttgaccaggttcttcagatagtgtgtgtaccatatcagtggcgtgtaactatgctcatcattgttcttgtcaatgcctttgtgtctatcacagtggaggagtcagtggatcggtggggaaaatgctgcttaccctgggccctgggctgtagaaagaagacaccaaaggcaaagtacatgtatctggcgcaggagctcttggttgatccagaatggccaccaaaacctcagacaaccacagaagctaaagctttagttaaggagaatggatcatgtcaaatcatcaccataacatagcagtgaatcagtctcagtggtattgctgatagcagtattcaggaatatgtgattttaggagtttctgatcctgtgtgtcagaatggcactagttcagtttatgtcccttctgatatagtagcttatttgacagctttgctcttccttaaaataaaaaaaaaaaaa

SEQ ID NO: 551 - DNA, 2896 bp, Homo sapiens
  CDS (66)..(2303)
tttcgtcgggcccagcagtctgcgcaccgggctcgctgctgcaccacgcgtcacccacgcagaccatggcagccgccgacggttcgctcttcgacaaccccaggacgttctccagacgtcccccagcccaggcgagtcggcaagcaaaggctacgaaaagaaaataccaagcgtccagtgaggctcccccagcgaaacggaggaacgaaacttcatttctcccagccaagaaaactagtgttaaagaaactcagaggacttttaaggggaacgcacaaaaaatgttttctccaaagaagcattcggttagcacaagtgatagaaaccaggaggagagacagtgcattaagacttcatcactgtttaaaaacaaccctgacattccagaactccacagacctgtggtaaagcaggtgcaagaaaaagtgtttacttcagctgcttttcatgagctgggcctccacccacatttaatttccacaataaatacggtcttaaaaatgtctagtatgaccagtgttcagaagcaaagtattcctgtgttgctggaaggcagagatgctctcgtgagatcccagacgggctcaggtaaaactcttgcctattgcatccctgtggtccagtcccttcaagcaatggagtcaaaaatacagcgcagtgatggcccctatgccctggtgctcgtgccaacgagagagctagctctacaaagctttgacactgtccagaaactgcttaagcctttcacctggattgtgcctggagtgttaatgggaggagagaagagaaaatcagaaaaggccagactccgcaaaggaataaatatccttatctcaactcctggacgcctggtggatcatataaaatccacaaagaacattcattttagtcggctgcggtggttggtgtttgatgaagcagacagaatcttggatttgggttttgaaaaggacatcacagtgatacttaatgctgtaaatgctgaatgccaaaaacgacagaatgtcttgctatcagcgacactcacagaaggtgtaacgcggctagctgatatcagtttgcatgatccagtcagtatttctgtcctggacaagagccatgaccagttgaacccaaaggacaaagcggtccaggaggtctgtcctccaccagctggcgacaagctggacagctttgcaataccagagagtctcaagcagcatgtgactgtggttcccagcaaactgaggcttgtctgcctagcggccttcatccttcagaaatgcaagtttgaggaagaccagaagatggttgtctttttctcaagttgcgagctggtggagttccactacagcctcttcctacagaccctgctgagcagctcaggggcgccggcatcagggcagttgccatctgcctccatgcgattaaaattcctacggctgcatggcggcatggagcaggaggaaagaacagcagtgtttcaggaattttcacattccagaagaggcgtccttctttgcacggatgttgcagctcggggcttagatctccctcaagtcacgtggattgttcagtacaacgctccatcttcacctgcagaatacatccaccggattggaagaaccgcccggattggctgccatgggagcagcctgctcattttggctccttcggaggcagaatatgtcaactcgttggcttctcacaaaatcaacgtttctgagattaagatggaagatattttgtgtgttctgacaagagatgattgttttaaagggaaacgatggggagcccagaaatcccatgctgttggcccccaggaaatccgagagcgagccacagtcttgcagacggtatttgaagattacgtgcactccagtgagaggagggtctcctgggcaaagaaagctctgcagtccttcatccaagcctacgccacctaccccagggagctgaagcacatcttccacgtccgatccctccaccttgggcatgtggcgaagagcttcggactaagagatgcccccaggaatcttagtgccttgactagaaagaagaggaaagcacacgtgaaaaggcctgaccttcataagaagacccagagtaaacacagcctcgctgaaatcctacgttcggaatactcaagcggcatggaggccgacgtcgccaaggtcaaaaagcaaaacgcacctggagagcctggtggccggcccctgcagcacagtctgcagccgacaccctgctttggccgtgggaaaacattaaaatggagaaaaacccaaaaaggtgtacagcgggacagcaagacttcccagaaagtttaaaatctctctgggtcttcgagtggaacctggaagccccgggtggcagtggattgatgtccagttcttgtcagaggagccttgtgaaaaataactgcgcctttgcctgaataccacgtccccaagaatcagaggggccacagcccttctcctccatgggaggccctggagcctgatagaaatcagtggtgtggggcactgtagagactagccagctcccgacggaaggggtctgtgtcttgtattgatcccatcagtgcccggcactcccttcacccaggtgctgacgtgccggggttgagctggcaccccgggatgtgatgtaagaacgccctgcgcgtcagcctggaacgggcttgattgctgcccttaactgtgttctgaagtttcacagcttggcttcagcctatcagcgcatacattggcatgaattttgtgaattagggtgttaaaaactggaattgaatttgtacaaaaagagaatatatttatcactaattattttcttaatgtaggaatgtaccgttaaaaaggaccaaaagtttttggtctgggtcaaaaaatacgaatgtgttctcagaaaaaaaaaaaaa

SEQ ID NO: 552 - DNA, 1159 bp, Homo sapiens
  CDS (349)..(744)
aagacagtccagagcttttcagccaatttgtctcctactctgtgtaaatatttttccctccgggcaggggagccagggtagagcaaaggagacaagcaggagtggaaggtgaggcgttctcctgcttgtactaagccaggaggctttaagctccagctttaagggttgtgagccccttgggggttcagggaactgcttgcccagggtgcagtgtgagtgtgatgggccaccggggcaagagggaaggtgaccgcccagctctcccacatcccactggatctggcttacaggggggtcggaagcctgtcctcaccgtctcgggggttgtggcccccgccccctccctatatgcacccctggaaccagcaagtcccagacaaggagagcggaggaggaagtcatgggaacgcagcctccagttgtagcaggtttcactattcctatgctggggtacacagtgagagtactcacttttcacttgtcttgctcttagattgggccatggctttcatcctgtgtcccctgacctgtccaggtgagtgtgagggcagcactgggaagctggagtgctgcttgtgcctcccttcccagtgggctgtgttgactgctgctccccacccctaccgatggtcccaggaagcagggagagttggggaaggcaagattggaaagacaggaagaccaaggcctcggcagaactctctgtcttctctccacttctggtcccctgtggtgatgtgcctgtaatctttttctccacccaaaccccttcccacgacaaaaacaagactgcctccctctcttccgggagctggtgacagccttgggcctttcagtcccaaagcggccgatgggagtctccctccgactccagatatgaacagggcccaggcctggagcgtttgctgtgccaggaggcggcagctcttctgggcagagcctgtccccgccttccctcactcttcctcatcctgcttctcttttcctcgcagatgataaaaggaatctggcattctacacctggaccatttgattgttttattttggaattggtgtatatcatgaagccttgctgaactaagttttgtgtgtatatatttaaaaaaaaaatcagtgtttaaataaagacctatgtacttaaaaaaaaaaaaaaaaaaaa

SEQ ID NO: 553 - DNA, 1367 bp, Homo sapiens
  CDS (65)..(622)
tggaggagagaagatggcggaagcggagtgagtgactagatgatttaaggaccatagtacagctatggatactgaaccaaacccgggaacatcttctgtgtcaacaacaaccagcagtaccaccaccaccaccatcaccacttcctcctctcgaatgcagcagccacagatctctgtctacagtggttcagaccgacatgctgtacaggcattgcatcggccccccagctcagctgctcagtaccttcagcaaatgtatgcagcccaacaacagcacttgatgctgcatactgcagctcttcagcagcagcatttaagcagctcccagcttcagagccttgctgctgttcaggcaagtttgtccagcggaagaccatctacatctcccacaggaagtgtcacacagcagtcaagtatgtcccaaacgtctatcaacctctccacttctcctacacctgcacagttaataagccgttcccaggcttccagttctaccagcggcagtattacccaacagactatgttactagggagtacttcccctaccctaacggcaagccaagctcaaatgtatctccgagctcaaatggtaagatatgagctaccaaattttttcagtgtttaaggacttgagagatcaaaatgtttccttgatttgatacaataagaggtatttttaatatttaagaaatgtttaattgtgtgtgtgtgcatgcgggcgtgccttcagctcttgtacatttatgtcatgaaagattctacttttaattaataggtcttcttggtatcaaatagtaattattacattgagaagctaatagagattcagtaacgtaagagtgattattttttaatatcaaattcattgaaaacctttttttcatattttaatatctgtgaaatttggatgcattttataactgatggcatcttggtacttacagtggtccataaaatcattgcctgtttttgtcaacttagatttggtgaaatagagatgttaaaaaaactttgttgttaaagttataatttgtatcctaggattttctgaattctatattggagttccggatagtctcccagatgattcttaactttggtttttcccatctcaaattctgcaaggttatttgtgttcttgtgttcattttgatattttatgaatataggaatgttaatttggttattctgtatttgagtatctacagattttctaatttaattgttgagcttctttaaggaatatagaaattggttgacatgtattttatttgatgtctttacaagaagctagacaaaagcattgtccctaatatatatttatattcttttttgtccagtggactgaatatatatctggatctcca

SEQ ID NO: 554 - DNA, 2229 bp, Homo sapiens
  CDS (150)..(1694)
attgctgacacacgtactggctgaactggtacatggcgggggggaccacctccccagccttctgtagggctgcctggctcttgtcgctgggccccagcagctcctggtcgtacaccaggtagacggcgcccccagccacacttcccttgatgaggaacctcatcagcgacacgaaatcgtcgacgatttcgtcagacctacacagaaaatcgcatctttggagaggaatagtcagcatcaccttgattgaagggagagacctcaaggccatggattccaacgggttgagcgatccctacgtgaagttccggcttgggcatcagaagtacaagagcaagattatgccaaaaacgttgaatcctcagtggagggaacaatttgattttcacctttatgaagaaagaggaggagtcattgatatcactgcatgggacaaagatgctgggaaaagggatgatttcattggcaggtgccaggtcgacctgtcagccctcagtagggaacagacgcacaagctggagttgcagctggaagagggtgagggacacctggtgctgctggtcactctgacagcatcagccacagtcagcatctctgacctgtctgtcaactccctggaggaccagaaggaacgagaggagatattaaagagatatagcccattgaggatatttcacaacctgaaagatgtgggatttctccaggtgaaagtcatcagagcggaagggttaatggctgccgacgtcactggaaaaagtgacccattttgtgtggtagaactgaacaacgatagactgctaacacatactgtctacaaaaatctcaatcctgagtggaataaagtcttcacgttcaacattaaagatatccattcagttcttgaagtgacagtttatgatgaagatcgggatcgaagtgctgactttctgggcaaagttgctataccattgctgtctattcaaaatggtgaacagaaagcctacgtcttgaaaaacaagcagctgacagggccaacaaagggggtcatctatcttgaaatagatgtgatttttaatgctgtgaaagccagcttacgaacattaatacccaaagaacagaagtacattgaagaggaaaacagactctctaaacagctgctactaagaaactttatcagaatgaaacgttgtgtcatggtgctggtaaatgctgcatactacgttaatagttgctttgattgggattcacccccaaggagtctcgctgcttttgtggtagtggaggacatgctagaggacgaggaagaagaagatgacaaagatgacaaggacagtgaaaaaaagggatttataaataaaatctatgccatccaggaggtatgtgtcagtgtccagaacatcctagatgaagtggcttcctttggcgaaaggataaagaatactttcaactggactgtcccattcttaagctggctggccattgtagccctctgtgtgttcacagccatcctgtactgcattccgctgagatacattgtccttgtctggggcatcaataaatttacaaaaaagcttcggagtccatatgcaattgataacaatgaactacttgacttcctttccagagtcccttcagatgtacaagtggtgcaataccaagaactgaaaccagatccttctcatagcccatataaaagaaagaaaaacaatcttggctagccagctcccagcactgaggagaccagcatctgtttgggaagataaaagaaaaagccctcagcctcagcagcatttcctttctttctgctttttatttattttgcctttttatcatgatcgagagaatctgtaaatagtgtacaaaggcatatgtctttgaatatatacttctattgtacagactcaacttgataaaggttttgctactgctgtgtcaaaaccttggtagctgtggataataatataacacactgaaagaacaaatataagaatgataacactggaagatatattcttatctaattactagcggattaaatactcacctgtgctctgattatatctacatcctttgtaaatgtcgatttgattttaaagtttttttttaatgcgactattttttatctgaaaagtaatccattacactttgctatgttttatacatttcaaaagggagggaaattccaaagcctgaataatggaatggatacatttcaatttagcatatattctggctttagatcccggcatg

SEQ ID NO: 555 - DNA, 3425 bp, Homo sapiens
  CDS (165)..(3422)
ggcgactttccctatatcgcagagactcatccctctgaccccagcccggaagcactgtccctcggagtccgagacttccacctgggtcgtgtccaaggccccggcgactccccggactcggggtgccgggccaacctccccgccgaggcccacccgccgtcgctatggcgtgcagtttgcagaagctgtttgctgtggaagaggagtttgaagatgaggatttcttgtctgctgtggaggatgcagagaaccggtttactggctcactgcctgtgaatgctgggcgcctgagacctgtctcttctaggccacaggagactgtgcaggcacagtcctccaggctgctgctgttacaccccactgctccctcagaggctttgggcctgccagacttggacctctgcctccctgcctccagcacgcccagtgctgacagccgtccatcatgcataggagcagctcccctaaggcctgtctctacttccagcagctggattggcaatcagagaagagtgacagtgacagaagtgctcagagagccagcaagacctcagtcctcagccttacaccccctactcacctttgagagccaacagcagcaagttggtggctttgaggggcctgaacaagacgaatttgataaagtcctggcaagcatggagttggaggagcctggcatggagctggaatgtggagtcagcagtgaggccataccaatcctgcctgcccagcagcgggagggttcagtattggctaaaaaagcccgggtagttgatctgagtggatcttgccagaaggggcctgtgcctgccatccacaaagcgggtatcatgtccgcccaggatgagtctctagatcctgtcatccaatgtaggactccacgaccccccttgagacctggtgctgtgggtcaccttcctgttccaactgccttaacagttcccactcagcaactccactgggaagtctgtccgcaacgctcccctgttcaagcacttcagcctctccaagctgctagagggaccattcagagcagccctcaaaatcgtttcccttgtcagccattccagtctccaagttcctggttaagtggcaaagctcatttacccagacctcgaactcccaactcaagctgttctactccctcaaggactagctctggattatttcctcggatacccttacaaccgcaagctccagtgtcttccattgggtctcctgttggtaccccaaaaggtccccagggagctctgcagacacccatagtcaccaaccacctggtgcagctagtcactgctgccagccggacaccccagcagcccacccatccctccacccgagccaaaactcgccgtttccctggcccagctgggatcctgcctcaccagcagagtgggagaagtctggaggacatcatggtttccgcgccccaaactccaacccatggtgctctggctaaattccagacagagattgttgctagttcccaggcatctgtggaggaggattttgggcgagggccctggctgaccatgaaatccacgctaggcctggatgagagagaccctagctgcttcctctgtacctacagcattgtcatggtgctgcgcaaggcagccctgaagcagcttcctaggaacaaggtccccaacatggcggtgatgatcaagtccctgactcggagcacaatggacgccagtgtggttttcaaggaccccacgggagagatgcaggggacggtgcacaggttgctgctggagacgtgccagaatgagctgaagcctggctcagtgctgctgctgaagcagattggagtgttttctccttcacttcgaaatcactacctcaacgtgacacccaacaacctggtccatatttacagcccggattctggggatgggagcttcctcaagccatctcagcccttccccaaggattcagggagcttccagcatgatgtggctgcaaagcccgaggaaggcttcagaacagcacagaacctagaggcagaggcgtcccctgaggaagaactcccagaagcagccctgcccatctccatgactgacctttttgcgcaccctggaccttgccaacccaagatgctcgctctagagatgaagcaggagtggctggaatgggaggaccggcggcgggcggctgcccagcagtgccggagccgcaggtgcccgtcaagtccccgggcccgactcactaggcctcaccgttcctgccgagacccagctgtccaccaagccctcttctccggcaacctgcagcaggtccaagccctgttccaagatgaagaggccgccaacatgattgtggagactgtgagcaaccagctggcctggtcggctgaacaggggttctgggtgctgacccccaagaccaagcagacggcacccctcgccatcgctacagcccgaggctacacagactgtgctcgacacctgatccggcagggagctgagctggatgcccgtgtcgggggtcgcgctgccttgcatgaggcctgtgcccgagcccagtttgactgtgtgcggctgctgctgaccttcggagccaaggctaatgtgctgactgaggagggcacgactcctttgcacctctgcacgatccccgagtccttgcagtgcgccaagttgctgctggaagcaggagcgacggtgaacctggcagcaggcgagagccaggagacgcccctgcacgtggcggcggcgcgcggcctggagcaacatgtggctctgtacctggagcatggcgccgacgtgggcctgcgcaccagccagggcgagactgcgctgaacacggcgtgcgctggggccgagggcccaggtagctgcaggcgacaccaggctgcggcgcgccggctcctggaggctggagctgatgcccgggcggccgggcgcaagcgccacacgccgctgcacaacgcttgtgccaacggctgcgggggcctggccgagctgctgctgcgttacggggcccgcgctgaggtccccaatggggcgggccacacgcccatggactgtgcgctgcaggccgtccaggactcccccaactgggagcctgaagtccttttcgccgcactgctggactacggggcgcagccagtgcgccctgagatgctgaaacactgcgccaacttccctcgggccctggaagtcctgcttaatgcctatccttgtgtcccatcctgtgagacctgggtggaggcggtgctcccagagctgtggaaggagcacgaagccttctacagctcggccctgtgcatggtgaaccagccaaggcagctgcagcacctggcccgactagctgtgcgcgctcggttgggaagccgctgccggcagggtgccacccggctgccactgcccccgctcctcagggactacctgctgctgcgtgtggaggggtgcatccagtga

SEQ ID NO: 556 - DNA, 5075 bp, Homo sapiens
  CDS (253)..(3750)
cgtcgtttcaggacccggacggcggattcgcgctgcctccgccgccgcggggcagccggggggcagggagcccagcgaggggcgcgcgtgggcgcggccatgggactgcgccggatccggtgacagcagggagccaagcggcccgggccctgagcgcgtcttctccggggggcctcgccctcctgctccccggggccggggctcctgctccggttgctggcgctgttgctggctgtggcggcggccaggatcatgtcgggtcgccgctgcgccggcgggggagcggcctgcgcgagcgccgcggccgaggccgtggagccggccgcccgagagctgttcgaggcgtgccccaacggggacgtggaacgagtcaagaggctggtgacgcctgagaaggtgaacagccgcgacacggcgggcaggaaaatccacccgctgcacttcgccgcaggttttgggcggaaagacgtagttgaatatttgcttcaaaatggtgcaaatgtccaagcacgtgatgatgggggccttattcctcttcataatgcatgctcttttggtcatgctgaagtagtcaatctccttttgcgacatggtgcagaccccaatgctcgagataattggaattatactcctctccatgaagctgcaattaaaggaaagattgatgtttgcattgtgctgttacagcatggagctgagccaaccatccgaaatacagatggaaggacagcattggatttagcagatccatctgccaaagcagtgcttactggtgaatataagaaagatgaactcttagaaagtgccaggagtggcaatgaagaaaaaatgatggctctactcacaccattaaatgtcaactgccacgcaagtgatggcagaaagtcaactccattacatttggcagcaggatataacagagtaaagattgtacagctgttactgcaacatggagctgatgtccatgctaaagataaaggtgatctggtaccattacacaatgcctgttcttatggtcattatgaagtaactgaacttttggtcaagcatggtgcctgtgtaaatgcaatggacttgtggcaattcactcctcttcatgaggcagcttctaagaacagggttgaagtatgttctcttctcttaagttatggtgcagacccaacactgctcaattgtcacaataaaagtgctatagacttggctcccacaccacagttaaaagaaagattagcatatgaatttaaaggccactcgttgctgcaagctgcacgagaagctgatgttactcgaatcaaaaaacatctctctctggaaatggtgaatttcaagcatcctcaaacacatgaaacagcattgcattgtgctgctgcatctccatatcccaaaagaaagcaaatatgtgaactgttgctaagaaaaggagcaaacatcaatgaaaagactaaagaattcttgactcctctgcacgtggcatctgagaaagctcataatgatgttgttgaagtagtggtgaaacatgaagcaaaggttaatgctctggataatcttggtcagacttctctacacagagctgcatattgtggtcatctacaaacctgccgcctactcctgagctatgggtgtgatcctaacattatatcccttcagggctttactgctttacagatgggaaatgaaaatgtacagcaactcctccaagagggtatctcattaggtaattcagaggcagacagacaattgctggaagctgcaaaggctggagatgtcgaaactgtaaaaaaactgtgtactgttcagagtgtcaactgcagagacattgaagggcgtcagtctacaccacttcattttgcagctgggtataacagagtgtccgtggtggaatatctgctacagcatggagctgatgtgcatgctaaagataaaggaggccttgtacctttgcacaatgcatgttcttatggacattatgaagttgcagaacttcttgttaaacatggagcagtagttaatgtagctgatttatggaaatttacacctttacatgaagcagcagcaaaaggaaaatatgaaatttgcaaacttctgctccagcatggtgcagaccctacaaaaaaaaacagggatggaaatactcctttggatcttgttaaagatggagatacagatattcaagatctgcttaggggagatgcagctttgctagatgctgccaagaagggttgtttagccagagtgaagaagttgtcttctcctgataatgtaaattgccgcgatacccaaggcagacattcaacacctttacatttagcagctggttataataatttagaagttgcagagtatttgttacaacacggagctgatgtgaatgcccaagacaaaggaggacttattcctttacataatgcagcatcttacgggcatgtagatgtagcagctctactaataaagtataatgcatgtgtcaatgccacggacaaatgggctttcacacctttgcacgaagcagcccaaaagggacgaacacagctttgtgctttgttgctagcccatggagctgacccgactcttaaaaatcaggaaggacaaacacctttagatttagtttcagcggatgatgtcagcgctcttctgacagcagccatgcccccatctgctctgccctcttgttacaagcctcaagtgctcaatggtgtgagaagcccaggagccactgcagatgctctctcttcaggtccatctagcccatcaagcctttctgcagccagcagtcttgacaacttatctgggagtttttcagaactgtcttcagtagttagttcaagtggaacagagggtgcttccagtttggagaaaaaggaggttccaggagtagattttagcataactcaattcgtaaggaatcttggacttgagcacctaatggatatatttgagagagaacagatcactttggatgtattagttgagatggggcacaaggagctgaaggagattggaatcaatgcttatggacataggcacaaactaattaaaggagtcgagagacttatctccggacaacaaggtcttaacccatatttaactttgaacacctctggtagtggaacaattcttatagatctgtctcctgatgataaagagtttcagtctgtggaggaagagatgcaaagtacagttcgagagcacagagatggaggtcatgcaggtggaatcttcaacagatacaatattctcaagattcagaaggtttgtaacaagaaactatgggaaagatacactcaccggagaaaagaagtttctgaagaaaaccacaaccatgccaatgaacgaatgctatttcatgggtctccttttgtgaatgcaattatccacaaaggctttgatgaaaggcatgcgtacataggtggtatgtttggagctggcatttattttgctgaaaactcttccaaaagcaatcaatatgtatatggaattggaggaggtactgggtgtccagttcacaaagacagatcttgttacatttgccacaggcagctgctcttttgccgggtaaccttgggaaagtctttcctgcagttcagtgcaatgaaaatggcacattctcctccaggtcatcactcagtcactggtaggcccagtgtaaatggcctagcattagctgaatatgttatttacagaggagaacaggcttatcctgagtatttaattacttaccagattatgaggcctgaaggtatggtcgatggataaatagttattttaagaaactaattccactgaacctaaaatcatcaaagcagcagtggcctctacgttttactcctttgctgaaaaaaaatcatcttgcccacaggcctgtggcaaaaggataaaaatgtgaacgaagtttaacattctgacttgataaagctttaataatgtacagtgttttctaaatatttcctgttttttcagcactttaacagatgccattccaggttaaactgggttgtctgtactaaattataaacagagttaacttgaaccttttatatgttatgcattgattctaacaaactgtaatgccctcaacagaactaattttactaatacaatactgtgttctttaaaacacagcatttacactgaatacaatttcatttgtaaaactgtaaataagagcttttgtactagcccagtatttatttacattgctttgtaatataaatctgttttagaactgcagcggtttacaaaattttttcatatgtattgttcatctatacttcatcttacatcgtcatgattgagtgatctttacatttgattccagaggctatgttcagttgttagttgggaaagattgagttatcagatttaatttgccgatgggagcctttatctgtcattagaaatctttctcatttaagaacttatgaatatgctgaagatttaatttgtgatacctttgtatgtatgagacacattccaaagagctctaactatgataggtcctgattactaaagaagcttctttactggcctcaatttctagctttcatgttggaaaattttctgcagtccttctgtgaaaattagagcaaagtgctcctgttttttagagaaactaaatcttgctgttgaacaattattgtgttcttttcatggaacataagtaggatgttacatttccagggtgggaagggtaatcctaaatcatttcccaatctattctaattaccttaaatctaagggaccaacacaaattccaacaggacgggtcgattttatccaagaatattttcccggtccattaacctgggtaaaggcggataatagccactcaactcggggtaactaccggacttaaagtcttgtgtataggcccctaaggcctaaaggaacggctgaaaaagagaaatagaccaggatccccaacattaaccccggaaacgcgggggacaattagacacacagcaactgctaacacaagcccacagcgatacacaacatcaaagcagctacacacacacataataagacaacgcagtgtctcgcttcccttctcttcttcacttccccgtctcaagaga

SEQ ID NO: 557 - DNA, 4988 bp, Homo sapiens
  CDS (161)..(1363)
tttcgtgcaaaaagtgggttacacgacagcacagcctcgctgctggagatgaaaaaccaataatcccagaaaacggcgcatagggtaggctgggccagccgaggattatgtgaaggttcgttgggaccctccggaggccagtggggtactgcaaagagccatgggggtgttgatgtccaagcggcagacagtggagcaggtgcagaaggtgagtctggctgtgtctgctttcaaggatgggctgcgggacaggccttccatccgacgcacaggtgagctgccagggtcccgccgtggcactgtagagggctccgtccaggaggtacaggaggagaaggaagcagaagcaggaacctcggtggtccaggaagagagtagtgccggccgcgcagcctgggagcggctccgagatgggcgcggcgtggagcctgaggagtttgacaggacaagtcgattcacaccccctgcgttcatccgccccacccggaagctggatgatgacaaacctccagaaatctgcctggagcccagagagcctgttgtcaacgatgagatgtgtgatgtttgtgaggtctggacagctgagagcctcttcccgtgcagggtctgcaccagggttttccatgatggctgcctgcgccgcatgggctacatccaaggagacagtgcagcggaggtgacggagatggcccacacagaaacaggctggagctgccactactgtgacaacatcaacttgctgcttactgaggaggaaatgtatagcctcacggagacctttcagcggtgtaaagtcatccctgattgctccctgacactggaggactttctgcgttaccgccaccaagcagccaagcggggggaccgtgacagggccctgagtgaggagcaagaagagcaggcggcccgccagtttgctgccctggaccctgaacatcgaggccacatagagtggcctgacttcttgtcccatgagtccctcctgcttctgcagcagttgcgtccccagaactctctgttgaggcttctgacagtgaaggagcgggagcgagcccgagccgccttcctggctcggggcagtgggagcaccgtcagtgaggcagagtgccgccgggcccagcactcttggttttgcaaacggttcccagaggctccttcctgcagtgtcagcagcatcagccatgtgggtcccatcgcagatagcagcccagccagcagcagcagcaagagtcaggacaagaccctgctgcccacagagcaggagtccagatttgtggactggcctaccttcctgcaagagaatgtcctctacatcctggctgctcgccccaacagcgcagccattcacctgaagcccccaggatagcatggagcagagaagctcggtttgaggacagtgacatcctctccctcctttcctttctcccttcccccaccaacctctggcacagagactcatggggttgggacactgccagcgtcttaacttgtcactaagctttaaggcactgaaatcaccattcccctcacaatagaggcagtgaatgcattgccacaaggagaagccctgggagctgtggcagcatcctctcctggaccgcccctgccccacatcatagacgggacctgccaccacacttatatacatgtgcacatgctgcccagctgtccatgccttcagaagcctggttctttttggttgagaaaggaccaaagtccctttgtgaagcccctggtatagaggagggggtctctactcaccccttctataggcaggccagttctaatttccaatagataagtctctggccaagtgattcttaggaagggggcatgtcagactcgcatgcctgcctagagctcctggagatcctaatgggccccgctttctccaccaaaaatcccttctgcagtcagctgctgttactagtaggtgtgcattatgtacctcggctgtactgagttgggaaaagagttaaacatcaccactgaaattcagccctttatttatttaaattccaattcctggtgacagaaaaggcaactagcctggagaatcctgactggaagagggggaggcagcccttcccagggactcgggattctaggaacctctcagtcaggtcacctgagtccaaaagtctttagcagggtagtcaaaaatcaaggtgagccttcttggccccatttttcagatggtagctcatggcctagggccaagggggcctgaatggagcaaacacactggcaggagccacagccctctgtgttagatgcttcacccaagtcaccgaccacagagactgacgagagcacactctggaggaagaggagagaacggggccctgcttcctcatcattccagctcaactcaactgtagacaccttccacagcccaagaaagatctgcagagccctgagcagggactctttcagccatcctgacaaacaggataagaggctggggcttaagaagaggctctgcagagaaggtcctgggaaagccttacagaagttttccgcttctccctatcactgagactcggcttgagtggctgcttctcctcactgctcatcacatgtccttccccagcaggctagggcttgggcctggcatggaaggccttttggggcaatcagaggctgccacaagagcaccaagcctggcctccaagccccagccctccttcctaagtactcatcaaattcaaattcttcagtccgtgtgttatggctcatcttggccggccgtggggtccatgttctaggcttctgtttccaacttaatgacttaggcatagcgagatctgactaccaagagttattcaaaagggagtggagtgcagtcatgcagaagcaaacacgtcttcattgctcaaggcccttgtgctaaatcgggtgcgtacagaagaacacacaccgctcggtgctgaatgtttcgaggaaagcaaggagctgcggccaggggcttcttgagagccctgtgtagtctcctcctgtaggaaccaccttagctggaagcagggtggtgagctgctggggttggattatttgggactgaaatgaagcagacaggagacaaatctgggctcaggtgtatggcccacagcttttagaaatgctcttcagccgtcccccaggattgatccataggaggggccattattcagtctagtcaaaacaagaaagcgcaggactcctgggcctaagaactgcatctgaagcagccaggcctggggttttgcactgagatgaaagcacattaagcacaggggctcttacctactctcctggcaaatcatctcctgtgccactggccttgggctgctcgatctcacagacggggcattttgagtagagacaagctctgggctttgagagctgaatagcatttttctcctgcctcatcagtcacagggactggaagtccatcttgttccctgatccttcacagatcaaggtgatgcctacctctttggagctgctgcctctagctctccacgggtgagtgaggagagttggtgggccaggtcaggcctgccgtattccagggcctggcaaagcagccccagagttcttccacaacaggaacaggcccatttggatcacgcttctccctattccagaacagcaaacttcctgggtgagggcctgctacagagatcccaggggacacttccctcagcaaagagtagagttcccatcccacaagagtcctaggaagcaggaaagcacgaaggagcagccagcctcttctccacaggcagtcatctagctttttaccaaaggggaagtgccgttgctccccaagtccagagttgcagacgccctgccccaacccccgtccagaatctccctttgcagtgttctaatccccagagcccctctgcggtatgtatagagttgttaaaaacgttcagaaacccagtgaagcccatttcgttttcaagccctcccatcactgtgactctgaaattctgccaagtacaaatattagcgtttggctctaataagggtatgagaaaatgtttcagtcttttctttgtggctacccaaaattgagatcagtgtttctaaccaaggaaggcctgggttatagacaggctcctctgaagcccacttgccctaagcatttttcacctagcattcctcttcctcatgttcagatgtgaatgaaggggcagctggaggatgtggtggagctgcagggaccgagggtcagctgagcagtggccctggccacaaaaccactccaagtctgctccttggcttcctctcctgagcccagccttccccaacagaacacttgagcaagggcccctagagtatcccagggatggagcagtcccctcactctaggtactgatctaaccttcaagtgctcctcttcatttgaggacacctacagtagaaaccatgaggacattgcctctttctgccctcagcccaagtacctggggctagcagggcagataccagcctttctggtcctgctgctccctatgggatgtcaccctgaccttgcttaagtggccaagtcttagggtccccttattcctgtcaccattatgaaaaacacagcattaaactgcctgggaagaggacacctccttgggggagtgagccccaaggttatacccaggactcatagcccaaagcacaacctcggccattgcaggtttcacagcttcagtcagagtggtgccaggaagcccaaaagccaagagggaaggtcagcagaagctgcctggcaaggccccaggccagccaggcccaccccagagccaagagaaacttcaagcaggactgagaactggtagctggctctagtgatcctgaaagcatgttcccttcagaccagcagagtgaagacagacagatgtgtggccctaaaaggcagaacagttttgatgccagaacttcaggactgtcaccacagtccctttttacccctcctctatttacagtgaaataaaattcctattttc

SEQ ID NO: 558 - DNA, 5060 bp, Homo sapiens
  CDS (161)..(1435)
tttcgtgcaaaaagtgggttacacgacagcacagcctcgctgctggagatgaaaaaccaataatcccagaaaacggcgcatagggtaggctgggccagccgaggattatgtgaaggttcgttgggaccctccggaggccagtggggtactgcaaagagccatgggggtgttgatgtccaagcggcagacagtggagcaggtgcagaaggtgagtctggctgtgtctgctttcaaggatgggctgcgggacaggccttccatccgacgcacaggtgagctgccagggtcccgccgtggcactgtagagggctccgtccaggaggtacaggaggagaaggaagcagaagcaggaacctcggtggtccaggaagagagtagtgccggccgcgcagcctgggagcggctccgagatgggcgcggcgtggagcctgaggagtttgacaggacaagtcgattcacaccccctgcgttcatccgccccacccggaagctggatgatgacaaacctccagaaatctgcctggagcccagagagcctgtgagtatccagttaggacaggatcctcaagtcttagtgcatcagggagcaggacagggaagatggatgtgggttgtcaacgatgagatgtgtgatgtttgtgaggtctggacagctgagagcctcttcccgtgcagggtctgcaccagggttttccatgatggctgcctgcgccgcatgggctacatccaaggagacagtgcagcggaggtgacggagatggcccacacagaaacaggctggagctgccactactgtgacaacatcaacttgctgcttactgaggaggaaatgtatagcctcacggagacctttcagcggtgtaaagtcatccctgattgctccctgacactggaggactttctgcgttaccgccaccaagcagccaagcggggggaccgtgacagggccctgagtgaggagcaagaagagcaggcggcccgccagtttgctgccctggaccctgaacatcgaggccacatagagtggcctgacttcttgtcccatgagtccctcctgcttctgcagcagttgcgtccccagaactctctgttgaggcttctgacagtgaaggagcgggagcgagcccgagccgccttcctggctcggggcagtgggagcaccgtcagtgaggcagagtgccgccgggcccagcactcttggttttgcaaacggttcccagaggctccttcctgcagtgtcagcagcatcagccatgtgggtcccatcgcagatagcagcccagccagcagcagcagcaagagtcaggacaagaccctgctgcccacagagcaggagtccagatttgtggactggcctaccttcctgcaagagaatgtcctctacatcctggctgctcgccccaacagcgcagccattcacctgaagcccccaggatagcatggagcagagaagctcggtttgaggacagtgacatcctctccctcctttcctttctcccttcccccaccaacctctggcacagagactcatggggttgggacactgccagcgtcttaacttgtcactaagctttaaggcactgaaatcaccattcccctcacaatagaggcagtgaatgcattgccacaaggagaagccctgggagctgtggcagcatcctctcctggaccgcccctgccccacatcatagacgggacctgccaccacacttatatacatgtgcacatgctgcccagctgtccatgccttcagaagcctggttctttttggttgagaaaggaccaaagtccctttgtgaagcccctggtatagaggagggggtctctactcaccccttctataggcaggccagttctaatttccaatagataagtctctggccaagtgattcttaggaagggggcatgtcagactcgcatgcctgcctagagctcctggagatcctaatgggccccgctttctccaccaaaaatcccttctgcagtcagctgctgttactagtaggtgtgcattatgtacctcggctgtactgagttgggaaaagagttaaacatcaccactgaaattcagccctttatttatttaaattccaattcctggtgacagaaaaggcaactagcctggagaatcctgactggaagagggggaggcagcccttcccagggactcgggattctaggaacctctcagtcaggtcacctgagtccaaaagtctttagcagggtagtcaaaaatcaaggtgagccttcttggccccatttttcagatggtagctcatggcctagggccaagggggcctgaatggagcaaacacactggcaggagccacagccctctgtgttagatgcttcacccaagtcaccgaccacagagactgacgagagcacactctggaggaagaggagagaacggggccctgcttcctcatcattccagctcaactcaactgtagacaccttccacagcccaagaaagatctgcagagccctgagcagggactctttcagccatcctgacaaacaggataagaggctggggcttaagaagaggctctgcagagaaggtcctgggaaagccttacagaagttttccgcttctccctatcactgagactcggcttgagtggctgcttctcctcactgctcatcacatgtccttccccagcaggctagggcttgggcctggcatggaaggccttttggggcaatcagaggctgccacaagagcaccaagcctggcctccaagccccagccctccttcctaagtactcatcaaattcaaattcttcagtccgtgtgttatggctcatcttggccggccgtggggtccatgttctaggcttctgtttccaacttaatgacttaggcatagcgagatctgactaccaagagttattcaaaagggagtggagtgcagtcatgcagaagcaaacacgtcttcattgctcaaggcccttgtgctaaatcgggtgcgtacagaagaacacacaccgctcggtgctgaatgtttcgaggaaagcaaggagctgcggccaggggcttcttgagagccctgtgtagtctcctcctgtaggaaccaccttagctggaagcagggtggtgagctgctggggttggattatttgggactgaaatgaagcagacaggagacaaatctgggctcaggtgtatggcccacagcttttagaaatgctcttcagccgtcccccaggattgatccataggaggggccattattcagtctagtcaaaacaagaaagcgcaggactcctgggcctaagaactgcatctgaagcagccaggcctggggttttgcactgagatgaaagcacattaagcacaggggctcttacctactctcctggcaaatcatctcctgtgccactggccttgggctgctcgatctcacagacggggcattttgagtagagacaagctctgggctttgagagctgaatagcatttttctcctgcctcatcagtcacagggactggaagtccatcttgttccctgatccttcacagatcaaggtgatgcctacctctttggagctgctgcctctagctctccacgggtgagtgaggagagttggtgggccaggtcaggcctgccgtattccagggcctggcaaagcagccccagagttcttccacaacaggaacaggcccatttggatcacgcttctccctattccagaacagcaaacttcctgggtgagggcctgctacagagatcccaggggacacttccctcagcaaagagtagagttcccatcccacaagagtcctaggaagcaggaaagcacgaaggagcagccagcctcttctccacaggcagtcatctagctttttaccaaaggggaagtgccgttgctccccaagtccagagttgcagacgccctgccccaacccccgtccagaatctccctttgcagtgttctaatccccagagcccctctgcggtatgtatagagttgttaaaaacgttcagaaacccagtgaagcccatttcgttttcaagccctcccatcactgtgactctgaaattctgccaagtacaaatattagcgtttggctctaataagggtatgagaaaatgtttcagtcttttctttgtggctacccaaaattgagatcagtgtttctaaccaaggaaggcctgggttatagacaggctcctctgaagcccacttgccctaagcatttttcacctagcattcctcttcctcatgttcagatgtgaatgaaggggcagctggaggatgtggtggagctgcagggaccgagggtcagctgagcagtggccctggccacaaaaccactccaagtctgctccttggcttcctctcctgagcccagccttccccaacagaacacttgagcaagggcccctagagtatcccagggatggagcagtcccctcactctaggtactgatctaaccttcaagtgctcctcttcatttgaggacacctacagtagaaaccatgaggacattgcctctttctgccctcagcccaagtacctggggctagcagggcagataccagcctttctggtcctgctgctccctatgggatgtcaccctgaccttgcttaagtggccaagtcttagggtccccttattcctgtcaccattatgaaaaacacagcattaaactgcctgggaagaggacacctccttgggggagtgagccccaaggttatacccaggactcatagcccaaagcacaacctcggccattgcaggtttcacagcttcagtcagagtggtgccaggaagcccaaaagccaagagggaaggtcagcagaagctgcctggcaaggccccaggccagccaggcccaccccagagccaagagaaacttcaagcaggactgagaactggtagctggctctagtgatcctgaaagcatgttcccttcagaccagcagagtgaagacagacagatgtgtggccctaaaaggcagaacagttttgatgccagaacttcaggactgtcaccacagtccctttttacccctcctctatttacagtgaaataaaattcctattttc

SEQ ID NO: 559 - DNA, 1883 bp, Homo sapiens
  CDS (26)..(1573)
gtgcggggtcaagctctccgccttgatggtggccactgggcgggcgcgtggagcccggcgggctgggcagcagccgccgccgccgctgcgagtcaacgtggtgctcagcggcctcctcggcaagttgtttccaggcccagcgcgagcgtcgcaactccggcacgagggcaaccgactgtaccgcgagcgccaggtggaggcggcactgctcaagtacaacgaggcagttaagttggctccaaatgaccacttgctttatagcaatcggtctcagatttatttcaccttggagtctcatgagaatgcactgcatgatgcagaaatagcatgtaagctccgcccgatgggttttaaggacaatctggagctcccacattgttctagtcaggaggaagcagcagccaggggagatggcagcagtctgatggacccagctaaagtgaagggggatggtcagcagcaccacatgaaagaccaggaagaagaggaggagaagtgggatgctacctctccaaaagctgcttccagcaagactggaaaatgccaggaaaagaaaaggaaacattgccagattgaatcccaagaagaaacggggatgcctaataaagcctccaagcaagatcctcccactgatcagggggacaaacctgctctcagtttaccacttgcatctttcgacgcatctgaccttgaatgcgctctatgtatgagattattctatgagccagtcacaacaccttgcgggcatactttttgcttaaaatgcctagaaagatgcctagatcacaacgcaaagtgtccattgtgcaaagacggtctttcacagtgcttggcatcaagaaaatacagcaaaaatgtaataatggaggagctcatagctaaattccttccagaagaactgaaggaacgaaggaagctttatgaagaggaaatggaagaactttctaaccttaataagaatgtgcctattttcgtgtgtactatggcctatcccaccgttccttgtcccctgcacatctttgagccttgttaccgcctgatgattcgtagatgcattgagacaggcacgagacagtttggcatgtgccttggagatcctgtcaaagggtttgcagaatatggctgcatcctagagatcagaaatgttcaattctttgctgatggccgctcagtggttgacagcataggcaagaggcgcttcagggtgctccatcagagccagcgggatggctacaacacagccgacattgaatacattgaagaccaaaaggttcagggagaggattgtgctgagctcatgggattacataactgtgtctatcagcaagcatcattgtggtttcattcgctcaaattatccctaaagaatcggatactcaatcactttggtcccatgccggagaaagacgccgatcctcagatgaacccgaatggcccagcctggtgctggtggatgttagcagttcttcccttggaaagccgagctcagctccccttcctagcaatgaggtccttaaaggacagactgaatggtattcgacgagtcctggccttcatatcccgaaaccaaaactagtgagtggattgccgaagaggagctcccaccttccccactgccgtcggggggagtcttcttgtaaatatatctaattgcaataatatcttaacagaagggggtgtcaaacagaggcatcagcctgctgttgatcacagagagaaattgagtagaaagaccaaaagaatgtgacctatttgaaactttctgtcttaagatgcttcttgacatgctgcataactacataaacagcagaggtgtttaagagcccagaaaaacataatttgattttaacattaaaatttccaaaagtttaaaaaaaaaaaaa

SEQ ID NO: 560 - DNA, 4059 bp, Homo sapiens
  CDS (268)..(4056)
cagaatagtagttcacaaccatatttttcgaagacagcgaaatgcataagcattgagagaacttgttctctatggttgttactcccctatgattctgtaagggtaacaccgtccatgccagcaagcgctcggagacagtgagcgtggtagtcaatcacccgcctgtctcctcagtcatggcagccttcctggagaaccaggcgggacttgtgggcatccttcactgctctgtggtcagtgagcccctggccacactggtgctgtcacatgggggtcatatcctggcctccgcctccggggacagtgatcacagcccacgcttcagtggtacctctggtcccaactccctgcgcctggagatccgagacactggaggaagctgacagtggggagtacaagtgctcagccgccaactcccttggaaatgcaccctccaccctggacttccatgccaatgccgcccgtctcctcatcagcccggcagccgaggtggtggaaggacaggcagtgacactgagctgcagaagcggcgtaagccccacacctgatgcccgcttctcctggtacctgaatggagccctgcttcacgagggtcccggcagcagcctcctgctccccgcggcctccagcactgacgccggctcataccactgccgggcccgggacggccacagtgccagtggcccctcttcgccagctgttctcactgtgctctacccccctcgacaaccaacattcaccaccaggctggaccttgatgccgctggggccggggctggacggcgaggcctccttttgtgccgcgtggacagcgacccccccgccaggctgcagctgctccacaaggaccgtgttgtggccacttccctgccatcagggggtggctgcagcacctgtgggggctgttccccacgcatgaaggtcaccaaagcccccaacttgctgcgtgtggagattcacaaccctttgctggaagaggagggcttgtacctctgtgaggccagcaatgccctgggcaacgcctccacctcagccaccttcaatggccaggccactgtcctggccattgcaccatcacacacacttcaggagggcacagaagccaacttgacttgcaacgtgagccgggaagctgctggcagccctgctaacttctcctggttccgaaatggggtgctgtgggcccagggtcccctggagaccgtgacactgctgcccgtggccagaactgatgctgccctttacgcctgccgcatcctgactgaggctggtgcccagctctccactcccgtgctcctgagtgtactctatcccccggaccgtccaaagctgtcagccctcctagacatgggccagggccacatggctctgttcatctgcactgtggacagccgccccctggccttgctggccttgttccatggggagcacctcctggccaccagcctgggtccccaggtcccatcccatggtcggttccaggctaaggctgaggccaactccctgaagttagaggtccgagaactgggccttggggactctggcagctaccgctgtgaggccacaaatgttcttggatcatccaacacctcactcttcttccaggtccgaggagcctgggtccaggtgtcaccatcacctgagctccaagagggccaggctgtggtcctgagctgccaggtacccacaggagtcccagaggggacctcatatcgttggtatcgggatggccagcccctccaggagtcgacctcggccacgctccgctttgcagccataactttgacacaagctggggcctatcattgccaagcccaggccccaggctcagccaccacgagcctagctgcacccatcagcctccacgtgtcctatgccccacgccacgtcacactcactaccctgatggacacaggccctggacgactgggcctcctcctgtgccgtgtggacagtgaccctccggcccagctgcggctgctccacggggatcgccttgtggcctccaccctacaaggtgtggggggacccgaaggcagctctcccaggctgcatgtggctgtggcccccaacacactgcgtctggagatccacggggctatgctggaggatgagggtgtctatatctgtgaggcctccaacaccctgggccaggcctcggcctcagctgacttcgacgctcaagctgtgaatgtgcaggtgtggcccggggctaccgtgcgggaggggcagctggtgaacctgacctgccttgtgtggaccactcacccggcccagctcacctacacatggtaccaggatgggcagcagcgcctggatgcccactccatccccctgcccaacgtcacagtcagggatgccacctcctaccgctgcggtgtgggcccccctggtcgggcaccccgcctctccagacctatcaccttgtacgtcctctacgcgccccgcaacctgcgcctgacctacctcctggagagccatggcgggcagctggccctggtactgtgcactgtggacagccgcccgcccgcccagctggccctcagccacgccggtcgcctcttggcctcctcgacagcagcctctgtccccaacaccctgcgcctggagctgcgagggccacagcccagggatgagggtttctacagctgctctgcccgcagccctctgggccaggccaacacgtccctggagctgcggctggagggtgtgcgggtgatcctggctccggaggctgccgtgcctgaaggtgcccccatcacagtgacctgtgcggaccctgctgcccacgcacccacactctatacttggtaccacaacggtcgttggctgcaggagggtccagctgcctcactctcattcctggtggccacgcgggctcatgcaggcgcctactcttgccaggcccaggatgcccagggcacccgcagctcccgtcctgctgccctgcaagtcctctatgcccctcaggacgctgtcctgtcctccttccgggactccagggccagatccatggctgtgatacagtgcactgtggacagtgagccacctgctgagctggccctatctcatgatggcaaggtgctggccacgagcagcggggtccacagcttggcatcagggacaggccatgtccaggtggcccgaaacgccctacggctgcaggtgcaagatgtgcctgcaggtgatgacacctatgtttgcacagcccaaaacttgctgggctcaatcagcaccatcgggcggttgcaggtagaaggtgcacgcgtggtggcagagcctggcctggacgtgcctgagggcgctgccctgaacctcagctgccgcctcctgggtggccctgggcctgtgggcaactccacctttgcatggttctggaatgaccggcggctgcacgcggagcctgtgcccactctcgccttcacccacgtggctcgtgctcaagctgggatgtaccactgcctggctgagctccccactggggctgctgcctctgctccagtcatgctccgtgtgctctaccctcccaagacgcccaccatgatggtcttcgtggagcctgagggtggcctccggggcatcctggattgccgagtggacagcgagccgctcgccagcctgactctccaccttggcagtcgactggtggcctccagtcagccccagggtgctcctgcagagccacacatccatgtcctggcttcccccaatgccctgagggtggacatcgaggcgctgaggcccagcgaccaaggggaatacatctgttctgcctcaaatgtcctgggctctgcctctacctccacctactttggggtcagagccctgcaccgcctgcatcagttccagcagctgctctgggtcctgggactgctggtgggcctcctgctcctgctgttgggcctgggggcctgctacacctggagaaggaggcgtgtttgtaagcagagcatgggcgagaattcggtggagatggcttttcagaaagagaccacgcagctcattgatcctgatgcagccacatgtgagacctcaacctgtgccccacccctgggctga

SEQ ID NO: 561 - DNA, 316 bp, Homo sapiens
  CDS (113)..(262)
tttagcaagaaaattcccaggcctgagaagaaatatttcaaaatgcccataaaggaggtaaaaatgaaaaccataacctaacttttatagaggctttatctttaatttaacgatgtgcggaggactttcttgcttgaatctgttccgggctgtctgctctgtccatcaaatgggcaggtctggaatgaggcaccttcggccgttcagaagtggcctgaacagaatgctggaacccaggctggactcggacacactaaggttttgattttgaatttcagccttattagaagatctaacctaagagtaagttatccac

SEQ ID NO: 562 - DNA, 1453 bp, Homo sapiens
  CDS (840)..(1070)
ggggacctcaaacagtccaaaggagaagcctggggtggtcaggggtggtcagggacaggcttaggggcaccttgaaagttcaggctgactggggctaggggaacatgtgggtaacaggttaaaggggggggggctggaaaatgcagacaccaaagacccttcaatatgaggccaagaaaggaaggttcagaacagggaaaaggaaggcttccatgatcctggccacaatcctgtgaattaggttttagtattctcagtctgaagataaggaattattgatacaattcagaaaggtagagcaacttgctttaggtcacacagtgaatgagtagtgcagacaggattcaagtctgcccccttgattctgaagccaaagctctttttcctgcttggtgcaggtgagtgggaggcatggggtggatgagaagcctaggcagaggcttttcctgcatccctcctcagtttccctattcacagatgccggcctccctgtctacctgtatgaatttgagcaccacgctcgtggaataatcgtcaaaccccgcactgatggggcagaccatggggatgagatgtacttcctctttgggggccccttcgccacaggtgcaaaggtcccacctgataccccaactgggtgtccagtctcccacctctggatgcagacccacccctccattggctggccacagggagctcaccagttcctaatctgttatgctctcccaaatgaaagtcttctgctccggaagcagcagaagcagcaggagtagggtgggaggtcagtgtcccctgctctgtccgaaatcccacatcccattctgcccccaggcctttccatgggtaaggagaaggcacttagcctccagatgatgaaatactgggccaactttgcccgcacaggaaaccccaatgatgggaatctgccctgctggccacgctacaacaaggatgaaaagtacctgcagctggattttaccacaagagtgggcatgaagctcaaggagaagaagatggctttttggatgagtctgtaccagtctcaaagacctgagaagcagaggcaattctaagggtggctatgcaggaaggagccaaagaggggtttgcccccaccatccaggccctggggagactagccatggacatacctggggacaagagttctacccaccccagtttagaactgcaggagctccctgctgcctccaggccaaagctagagcttttgcctgttgtgtgggacctgcactgccctttccagcctgacatcccatgatgcccctctacttcactgttgacatccagttaggccaggccctgtcaacaccacactgtgctcagctctccagcctcaggacaacctctttttttcccttcttcaaatcctcccacccttcaatgtctccttgtgactccttcttagggaggtcgaccgggaattccggagcgg

SEQ ID NO: 563 - DNA, 2797 bp, Homo sapiens
  CDS (128)..(2683)
gctcggtacccccgtgatagttctggcagacggagcactgcagaaaccttcaaatgaaggtgtcattgaaataaaagcaactaaggtctgtgaccagaggaccaaatgtaaaagtcgctgtaatgaaatgctgccaggcacgtcaacaggcaataatcaaagcactatcactctatcagttgcttctcagaacttaactttcaccagcagcagctcaccacctaatggtgactcaatcaataaagaccctaaattatgcactaaaagcccaagaaaacgactgtcttctacattgcaagagacccaggtgcctcctgtaaagaaaccaattgtggaacagctttcagcagctaccatagaagggcagaaacaaggcagtgttaagaaggaccaaaaggttccacattcagggaaaacagaaggttcaacagcaggtgctcagattcctagcaaggtatcagtaaatgtcagttcacacataggagcaaatcaacccttgaattcctctgcccttgttatcagtgattcagctttggaacagcaaacaaccccatcatcatctccagatataaaagtaaaacttgaaggaagtgtctttctcttggacagtgattcaaagtcagttggcagctttaatccaaatggatggcaacaaatcactaaagattctgagtttatatctgccagttgtgaacaacagcaagatatcagtgttatgacaattcctgagcactctgatatcaatgacttagagaaatctgtttgggaattagaaggaatgccacaggacacatatagccagcagctacatagccagatacaggaatcttctttaaatcaaatacaagcacattcttcagatcagttacctctgcaatctgaactgaaggagtttgagccttctgtttcccagacaaatgaaagctactttccttttgatgatgaacttacacaagatagtattgtggaagagctggtgcttatggagcagcaaatgtcaatgaacaattctcattcttacggcaactgtttgggaatgacccttcagagtcagtcagtaactccaggagctccaatgtcatctcacacttccagcacccacttctatcatccaatccacagcaatggcactccaatccacacacccacacccacacccacacccactcctactccaaccccaaccccaaccccgacatctgaaatgattgctggatctcagagtctgtcacgggagagcccttgctccaggctagcccagactacacctgtggatagtgctttaggaagtagccgacatacacccattggtactccacattctaactgcagcagtagtgtcccccccagccctgttgaatgcaggaatccgtttgcattcactccaataagctccagtatggcatatcatgacgccagcattgtctcaagtagtcctgtgaaaccgatgcaaagacccatggccacacaccctgacaaaaccaagcttgaatggatgaataatgggtatagtggggttggtaattcatcagtttctggccatggtattctcccaagctatcaggaactagtggaagaccgtttcaggaaacctcatgcttttgctgtgcctggacagtcttatcagtctcaatccagacatcatgacactcattttggtcgtttgactcctgtctctcctgtgcagcatcaaggtgccactgtaaataacaccaacaaacaggagggttttgcagtccctgcccctcttgataataaaggaactaattcatctgccagcagcaacttcagatgccggagtgtgagccctgctgttcatcgccaacgtaatcttagtggaagcaccctctatccagtatctaatatcccacgatctaatgtgaccccctttggaagtccagttaccccagaagttcatgttttcacaaatgttcacacagacgcatgtgccaacaacatagctcaaagaagccaatcagttccattgacagtcatgatgcagacagccttcccaaacgctcttcagaagcaagcaaacagtaaaaaaataaccaatgttttgttgagtaaacttgattccgacaatgatgatgcagtgagaggtttgggaatgaacaacctgccctctaattatacagcccggatgaatctcactcagattttggaaccttccactgtttttcctagtgccaacccacaaaatatgatcgattccagcacttctgtttatgagttccaaacaccatcttacctcaccaaaagtaatagcaccggtcagatcaatttttctcctggagataatcaagcacaatcagaaattggagagcaacaattagatttcaatagcactgttaaagacctgttgagtggagacagcttgcaaaccaaccagcagctggtaggtcagggagcatctgatctcactaatactgcatctgatttctctagcgatatcaggttgtcttctgagctctcaggcagcatcaatgatttgaacactttagacccaaatctactgtttgatccaggtcgtcagcagggacaagatgatgaagctacactggaagaattaaagaatgacccattatttcaacaaatttgcagtgaatccatgaattctatgacttcatcaggttttgaatggatagaaagcaaggaccatcctactgttgaaatgttgggttaaattgtgttttataacatgtagcacactgtatctaaagacatatgtattgtatttgtcttaatggaagtgcctcccgcagcagaaatactattaagttgtgaaccaaatttt

SEQ ID NO: 564 - DNA, 3537 bp, Homo sapiens
  CDS (434)..(2785)
tttcgtgcggctgagtgacggacggtggaggcccagagcccgggcctgaagggggggacaaacctgggtgcccgcaggagcccggcagggtgtcttacaagtatcaagaacttactatatgtggttgaataaacaatcaaggtaaagagcatcaagtaaaaacttctgcttgttgataagtacttcagacattcccccagtggctgaagtggcatatgaattatgaagttggatcatttggaatgaatgtaagagaattgccaagggctcctcctactccagagaggaaacctcatccagggccatgaagccacttcctcaccatctgtgtgctgcttaagctaatgctgcgggaaccatggttccttgggaggaatcaagctgactcttggcatgagattcctgccttcctagggttgagagcggcactgccatggcttctctggacgacccaggggaagtgagggagggcttcctctgccctctgtgcctgaaggatctgcagtctttctatcagcttcactcacattacgaggaagaacactcaggggaagaccgtgatgtcaaagggcaaattaaaagtcttgtccagaaggctaaaaaagcaaaggacaggttgttgaaacgagaaggggatgatcgagcagagtcagggacccaaggatatgagtctgtcagctatggaggggttgatcctaacatgtgggaaccccaggagcttggtgctgtgagaagccatctttccgacttcaaaaaacaccgagctgctaaaattgaccactatgttgtggaagtcaataaactaataatcaggttagagaagctcactgcatttgacagaacaaatactgagtctgcaaagattcgagcaatagaaaagtctgtggtgccttgggtcaacgaccaggatgtccctttctgtccagactgtgggaataagttcagcatccggaaccgccgccaccactgccgcctctgcgggtctattatgtgcaagaagtgtatggagctcatcagccttcccttggcaaacaagctcaccagtgccagcaaggagtccctgagcacccacaccagccccagccagtcacccaacagtgtccatggctcccgccgaggcagcatcagcagcatgagcagtgtcagctcggtcctggatgagaaggacgatgaccggatccgctgctgtacacactgcaaggacacgctgctcaagagagagcagcagattgatgagaaggagcacacacctgacatcgtgaagctctacgagaaattacgactttgcatggagaaagttgaccagaaagctccagaatacatcaggatggcagcatcattaaatgctggggagacaacctacagtctggaacatgccagtgaccttcgagtggaagtgcagaaagtgtatgagctgatagacgctttaagtaagaagatcttaaccttgggcttgaaccaggaccctccaccacatccaagcaatttgcggctgcagagaatgatcagatactcagctacactttttgtgcaggaaaagttgcttggtttgatgtcactgccaaccaaagaacagtttgaggaactgaaaaagaaaaggaaggaggaaatggagaggaagagggccgtggagagacaagctgccctggagtcccagcgaaggcttgaggaaaggcagagtggcctggcttctcgagcggccaacggggaggtggcatctctccgcaggggccctgcccccttgagaaaggctgagggctggctcccactgtcaggaggtcaggggcagagtgaggactcagacccgctcctccagcagatccacaacatcacatcattcatcaggcaggccaaggccgcgggccgcatggatgaagtgcgcactctgcaggagaacctgcggcagctgcaggacgagtatgaccagcagcagacagagaaggccatcgagctgtcccggaggcaggctgaggaggaggacctgcagcgggaacagctgcagatgttgcgtgaacgggagttggaacgagaaagggagcagtttcgggtggcatccctgcacacacggactcggtccctggacttcagagaaatcggcccttttcagctggagcccagcagagagcctcgcacccaccttgcttatgctttggatctaggctcttccccagttccaagcagcacagctcccaagaccccttcacttagctcaactcaacccaccagagtgtggtctgggcccccagccgttggccaggagcgcttaccccagagcagcatgccacagcaacatgaggggccctccttaaacccctttgatgaggaagacctctccagccccatggaagaggccactactggtcctcctgctgcaggggtttccttagacccttcagcccgcatcctgaaagagtacaatcctttcgaggaagaggacgaggaggaggaagcagtggcagggaatccattcattcagccagacagcccagctcctaaccccttcagtgaggaagacgaacatccccagcagaggctctcaagccctctggttcctggtaacccctttgaggaacccacctgtatcaacccctttgagatggacagtgacagtgggccagaggctgaggagcccatagaggaagagctcctcctgcagcagatcgataacatcaaggcatacatctttgatgccaagcagtgcggccgcctggatgaggtagaggtgctgacagagaatctgcgggagctgaagcacaccctggccaagcagaaggggggcactgactgaccagcagtggagagggcacctttgggcccaggggtctggcaggagccagtggagcaggacagagggcaggcaggatggatggggaaggtggcagggtgagaactcagatgcacacaggtgaggggcaggaatctgctgttttgtgttgcgcactttgaggtatttccactacagttgaataataaaatagaaactagaacagggagaatcagcattcagttgctgcttttcctgtttattattactatcttttgtaatcggaggtttaccccttttgaagggactttacatttttactaccgagatataactaaatgcagctctgttgggcccagggcagaaatggctgctgtgtacctcttgggtccatttgctactgcctagtcttggttccttatgcagtattatagggcagcctttttagagcccttcctttagccaagacagagaagatagattccactgagctctattctgctctgacagaagtccatccctagtaggctgtgagttccatttcacctggggccgcctctcccctgctctgcacttcctgtctgtacaatagaagggggaggtgctgctatgaaggggagagtttagacccaggagagcccagcacctctttttaaggtggggtgatgggaatatttcaccagggtctattttctcactttaagttcttttttgtctctttcaggaagttaagctcccagtgcagggtatcaatgtgaatctggtcctgagct

SEQ ID NO: 565 - DNA, 4223 bp, Homo sapiens
  CDS (230)..(2632)
ttgacgtgtggaagcagttcttggggatgtgactactgccacggtgacaattctagaccaggaggcagcagggagcctcatattgccagcaccacccattgtggtcacacttgctgactatgaccatgtggaagaagttaccaaggaaggagtcaagaaatccccctccccaggctacccactggtctgtgtcaccccctgcgaccctcatttccccagatacgctgtcatgaaggagcgctgcagtgaggccggcatcaaccagacatctgtgcagttcagctgggaagtggctgcccccactgatggcaatggggcccggtctccctttgaaaccatcactgacaacacaccattcaccagtgtcaaccacatggtcctggacagcatttacttcagccggcggttccatgtgcgttgtgtggccaaggctgtggacaaggtgggccatgtggggacccccttaaggagcaacattgttaccattggaacagacagtgctatctgccacacaccagtggtggctgggacatccagaggcttccaggctcagtccttcatcgcaaccttgaaatacctggatgtcaaacataaggagcatccgaacagaatccacatttcggtgcagatcccacaccaggatggaatgctgccccttatctccaccatgccgttgcacaacttacattttctactgtctgagtccatctacagacaccagcacgtctgctccaatttagttaccacctatgacctgagaggcatctcagaggcagggttcctggatgatgtggtctatgatagcactgccctggggcctggctacgatcgccccttccagtttgaccccagcgtgcgagagccgaagaccatccagctctacaaacacctgaacctgaagagctgcgtgtggacctttgatgcttattatgacatgactgagctgattgacgtctgtgggggctctgtaaccgctgacttccaggtgagggactctgcccagtccttcttgacagtgcacgtgcctctatatgtgtcctacatctatgtgacagcccccaggggctgggcctccttggagcaccacaccgagatggagttttctttcttctatgacactgttctctggagaacaggaatccagacagacagcgtgctctctgcaaggcttcagataataagaatctacattcgagaggatggccgtcttgtcattgaattcaagacccatgccaaattcagaggacagtttgtgatggagcatcacactctcccagaagtgaaatctttcgtattgactccagaccacctaggaggaattgaatttgacttgcagctattatggagcgctcagacttttgattctccacatcaactctggagagccacaagctcttataacaggaaggactactcaggagagtacaccatctacctgatcccttgcacagtgcagcccacacagccatgggttgacccaggagagaagcctttggcctgcactgcacatgccccagaaagattcctgatacccattgcattccagcagaccaaccgccctgtgccagttgtgtattcacttaacactgaatttcagctctgcaataatgagaaggtgttcctaatggatcccaatacatctgatatgtcactagcagaaatggattacaaaggagccttttcaaaaggtcaaatcctttatggccgagtactttggaatccagaacaaaatcttaattctgcttacaaactccagctggagaaagtctatctttgtacgggcaaggatggttatgtgcctttctttgatcccacggggacaatctacaatgaagggccccagtatggatgcattcagccaaacaaacacctaaaacacagattcctgctgttggaccgcaatcagccagaggtaactgataagtacttccatgatgtgccttttgaggctcactttgcctctgagttgcctgatttccatgtggtcagtaacatgccaggtgtggatggatttactctaaaagtagatgcactctataaggtggaagcaggacaccagtggtatctccaggtcatctacatcattggccctgacaccatctcagggccccgggtccagcgctctctcacagctccactcagacgcaaccgaagggacctggtagagcccgatggccagctgatccttgatgattccctcatctatgacaatgaaggagaccaagtcaagaatggcaccaatatgaagtccctgaatctggagatgcaagagttggcggtagctgcgtccctgtcacagactggggcgtccattggcagtgccctggctgcaatcatgcttctacttctggtgtttttggtggcttgttttatcaacaggaaatgccagaaacagaggaagaagaagcccgcagaggacattttggaagaatatcctctgaataccaaggtagaagtgcccaagaggcacccggaccgggtggagaagaacgtgaatagacactactgcactgtgcggaacgtcaacatcctgagtgagcctgaggcggcttacacgttcaaaggtgctaaagtcaaaagactgaatctagaagtcagagttcacaacaatttacaagatggaacagaagtttaatggaggagacctatgtgtatttttttctaaaatcatttttataaaatggggggaaatactggtatttttataatctcgcagataaaaaagggaaaactatagctttgagtggcagacagcacacatcacatgcatcaactcacaactgagctacctcattcagcaaagaaccactgagaaccccagagtattacagttatttccgtagatccctttaatagtgtcaacaactgtacacagctccttctgtaaggctggtcttagaaaacaagtactttagtatcaggacaggagttgaacaattaggttagcagatggagatgagaggactgggtagagtaccatggcagatctcagagagaagaagtaggtacgggcctttggttccctcccccagccccagctttctcctacagggcttttcctgagtccccagacagcagagtatgaactgctgacaccctgattccattaaaaattctgctaatcgacacaacacatacatttgctcatgattttcacttgacagcgtatgctccttggcctctaattgtactttgcttttccagagccctttttacctggggatttcagtgtgcttaagtaaaatcctctgaaaaccacgggagcctctgccccctcagccacagagaactccctcctacaaagggggagactgaaacccgagttaaggaggggcctggcaggcgtatcagagcacattagtgatgcccttcaccccagggaggtgtctgttcccaactagtttatgtggcactgagacatccatccctgaccaaggatgctgcgaaacaggatcaatgtactacggccttttaattcaacattgccataaatgctttaaagaaaacccaccacactttcctcctactccggtctttgcccgttcctgtaacagacaatcccatgtcctaggtatggttttttattctgttagtgcttcgggaaagtaagtgattcatttgaataaggcaaattaggagaaagcccaggttggggtgaaatcagacttaacagatacatgctggttctccttgctgtgtgtgacacagcagacagaggcactattcctggtgcagtatttcagggatttctctttgaggggttcttttctggtagctcaggcaattatttttaccatatcagcacatgacaaggccatgaacacatggctctaaaataatttagtgttcaagtatcagcttaactattttgtgtaggctacacacagcttgcttttgtttctcttctgtttctgccttattggcggaaacataagcgtgcatgccatgttgttttgaattggaggcacaatttcattattcgagagtaaaagacatgtcctcttctgatgcatggcacaccatagtcaccaagcaaataacagagccttcacattgtgtaatatttgtatgagaatgactcaagctctttgagaacattccaaactagtaacatttcgctactaaaagctagaaaggatgaactgtgaaaggttctaggcagctctgtgagactccaagctccttgaaagtaggacctttgtgagccacgcctttcattcttc

SEQ ID NO: 566 - DNA, 1939 bp, Homo sapiens
  CDS (145)..(678)
tttcgtccggttgttaagcgcgctgttgctttgtaaaaatgcgtgtgttctggtgttttggctggggcagggaggggacaccccacgaggtctggggctgttgcccttgtgtcatccccccgccttttaactgcaaaggtcaccatggctgaccgggctgctgccgaaagggcctgcaaggatcccaatcccatcattgatggcagaaaggccaacgtgaacctggcatacttaggagcaaaaccaaggatcatgcaaccaggttttgcctttggtgttcaacaacttcatccagcccttatacaaagacctttcgggatacctgcccactatgtctatccgcaggcttttgtgcagccgggagtggtcattccacacgtccagccgacagcagctgccgcctccaccaccccttacattgattacactggagctgcatacgcacaatactcagcagctgctgctgctgccgccgccgctgctgcctatgaccagtacccctatgcagcctctccagctgctgcaggatatgttactgctgggggctatggctacgcagtccagcagccaatcaccgcagcggcacctgggacagctgccgccgccgctgcagcagctgctgccgctgcagcatttggccagtaccagcctcagcagctgcagacagaccgaatgcaatagaccagccatctgatcaaagttgaattgttttctctttccctcccaattttccaatttttagtagctaataagagagttaacattgacttaacagctttaaaaaaaaaaacagccatgctattgtgaagcagagttattattttttttatactccaggtagtgttctagatgagaaagaggtaagaatgaggggaatgggcacaattttggaaatcaatcccaaagagcctgagtaaatgaaaggccactacgaaatgacgccaggagtaacaacggaacttcacttttgtaacgggatttttatttttgctctttttatagtatcagggaagcaaactgccttttacaagttagaaaatgctgtttgaatctagttgaaccagggaatacagagcgagcaatatgtagcttgaattacatttaaaagcagattttttacaaacaaaatggcgaaagcactgattgtcatttttagcagtcacttaaggcctatagaacttttttcaagtcggaaggtcctgttcttactatctcaaaaatgggcatcgaacaatcaatctaggagcgtggcagtgggtaaaatggtggacaggcaccaaagctattttctcatctgtcctgtggatgagtggaactgtggaacaagtgatgtggaattaatgggtgcaacagctgtacagacaatcaataacacacacagttctggaaagaacacatcacttgtgcttgtttgatgagcttgtcacattctaatccctctccccatcctgtttcaattttgggaaacttgtatctgctggtgtcagcaattctgattctgaaataggatcaggcttttactacaacagccttctctttctatttattgtgtcgactcgtggcttatgaataaaggcaggcaaagtttgcagaactgtcttaaggacatttattttttttccctttttaagtaattttacactttagtatctatttcagagtcatatttaaaactatttattagtgactacagtacatgagacaacaaggttactgagattacaattcttcaaaggttaatgataatgtggtttatactgtgccttaatagtaatgctatttaagatatttatttttaagttttactatgctgcactctaaagaaaggaactttagatgtgacactgtaaaattatgtattcatctcatggcataaattatttagtaagtctagatgtagcgtattaaatattaacctattcaactaaaaaaaaaaaaa

SEQ ID NO: 567 - DNA, 2064 bp, Homo sapiens
  CDS (49)..(1863)
gaatcaccttgtgggttctcttgcaagaatagtaaccagtttggaataatgatgtatcataacaaccgactcataaaatcttttgagaaggtggggtgccaggtgaagccaactcgtggagaaggtgtaggagtaattggagtcattgagtgcaatttcctaaaacctgcctacaacaaacaagactttgagtataccaaggagtaccggctaacaataaatgcccttgcccagaagctcaatgcttactggaaggaaaaaacatctcaagataattttgagacctcaactgtagccaggccaataccgaaggttcctgaccagacatgggttcagtgtgatgagtgtcttaaatggagaaagcttcctgggaagattgatccatccatgttacctgcaagatggttttgttattataattcccatccaaagtacaggagatgctctgttccagaggaacaagaactcactgatgaagacctgtgcttgagcaaagctaagaaacaagaacaaactgttgaggagaagaagaagatgcctatggaaaatgagaaccaccaggtattcagtaatccaccaaagatccttactgttcaagaaatggctggattgaataacaagacaattggatatgagggaattcatagccctagtgtgcttccttctggtggagaagaaagcagatcaccatctcttcaacttaagcctctggattccagtgttttacagttttccagtaagtacaaatggatcctaggtgaagaaccggtggagaaacgaagaaggctccagaatgagatgacaacaccttctctagattattccatgcctgctccttacaggagggtagaagcacctgttgcctacccagaaggggagaacagccatgataaatcgagttctgagagaagtacaccaccataccttttcccagaatacccagaagcaagcaagaatacaggtcagaatagggaggtttcaattctgtatccaggggccaaagaccaacgccaggggtccctgcttcctgaagaattagaagatcagatgccaagattggtggcagaagaatctaacagaggtagcacaaccataaacaaagaagaagtcaacaagggaccttttgtagctgttgtgggtgttgccaaaggtgttagagattcaggagctcccattcagctgatcccttttaacagagaggagcttgctgagagacgaaaagcagttgaatcctggaacccagtgccttattctgtggcctctgctgcaatccctgctgcagccattggggagaaagcaagaggctatgaggagagcgaaggtcataatacaccaaagttgaagaaccagagagagctggaagaattgaagagaaccacagaaaaattggaacgtgttttggctgaaaggaatttgttccagcaaaaggtggaggagctggaacaggagaggaatcactggcagtctgaattcaagaaagtccaacatgaattggtgatctacagtacccaggaggcggaaggcttgtactggagcaagaaacacatgggttatcgccaagctgaattccagattctgaaagctgagctggaaagaaccaaagaggaaaagcaagagttaaaagagaaactgaaggaaacagagacacacctggaaatgctgcagaaggctcaggtctcctaccggaccccagagggagatgacctagaaagggctttggcaaagcttacgcggctacgtatccacgtcagctatctccttacttctgtcctccctcacttggagcttcgtgagatcgggtatgactcagaacaagtggatgggatcctgtacacggtgctggaggcaaatcacatactggattgagcaccagactgtatacccttctcttctcttacccttttttgcccttacagatacttccctctgcttagaatgtccttcctctattgtccacctagaaaacttttccttcatatttaatatcaaatataatctgctttgtgaagccttccctgactcccttaagcatatttaaaggtcgagcggccgcgaatttagtag

SEQ ID NO: 568 - DNA, 6244 bp, Homo sapiens
  CDS (100)..(3516)
cgtcgcggccccgccggcccgactctcaagcctcagctcccaggctaggctgtggccgccggtggcctggggagagtgcggcgccatgcctcgggcttaatgcgcccccccctacttctcccagtcttcagtcttaagtcgttagcctcctccctccgctttcagcagtggtctttcagctctcttcttgtgcgctgttgtcgagccccgaccagccccttccagacccagtcatcatgtcccagtccgggaataccggcctccggcggcgccccagccagcctccaggcccagaacggagccgccttggcctcggggtctccctacaccaacggtcctgtccaaaatgcattgctgtcttcacaagagtcagtgagccaaggatacaatttccagcttccaggatcctaccctcatccaataccagcaaagactttgaatccagtctctggacagtctaactatggtggttctcagggatctgggcagactcttaatagaccacctgtggcctctaatccagtgacaccttcgcttcatagtggtcctgctccccgaatgccattacctgcttctcagaacccagctactacaccaatgccttctagtagctttcttcctgaagccaacctgccaccacctttgaattggcaatataactatccatccacagcctcacaaacaaaccattgtcctcgtgcatcatcccaaccaactgtatctggaaatacaagtttaaccacaaatcatcaatatgtttcttctggatatccttcacttcaaaatagcttcataaagtcaggtccttctgtacctcccttagtgaatccacctctgcctacaacttttcaaccaggagctcctcatgggccccctccagctggaggcccacccccagtgagggccctcacgcccctgacatcatcatatagagatgtaccccagcccttatttaattcagctgtcaaccaagaaggtattacatcaaataccaataacggatctatggtggtccacagtagttacgacgagattgaaggaggtggcttattggcaacaccacagcttactaacaagaatcccaaaatgagccgaagtgttggatattcatatccctccttaccacctggttatcagaacacaacaccacctggtgcaactggagtaccaccctcttccttgaattacccaagtgggccacaagcctttactcagactcccttaggtgctaatcatttaaccacaagcatgagtggattaagtctacaaccagagggtctaagagttgtcaatcttcttcaagaaagaaacatgcttccgtcaacacctttgaagcctccagttccaaatttgcatgaagacatccagaaactcaactgtaacccagagttatttcgatgcacgctgactagcattcctcagacgcaggccttattgaataaagccaaacttcctttggggctgctgcttcatcctttcaaagacttagtgcaattgcctgtggttacctccagtacaattgtgagatgccgttcatgcaggacgtacatcaatcctttcgtcagctttcttgatcaaaggagatggaagtgtaacttatgttatcgagtcaatgatgttcctgaagaattcttgtacaaccctttgaccagagtttatggagaacctcacagaagaccagaagttcaaaatgctactattgagtttatggctccttcagaatacatgttacgaccacctcagcctccagtgtatctctttgtatttgatgtgtctcacaatgcagtcgaaactggatacttgaattcagtttgccagagtttgttagacaatctggatttgcttcctggcaacactagaacaaaaattggcttcataacatttgacagtacaatccatttctacggtcttcaggaaagtctctctcaacctcagatgctaatagtttcagatattgaagatgtttttatacctatgccagagaacttattagtaaacttaaatgaaagtaaagagctcgtgcaagatttactgaaaactttgccacaaatgtttaccaagactctggagacccagagtgccttgggtcctgcactgcaggctgcctttaagctgatgtctccaactggtggtcgaatgtctgtctttcaaacacaactcccaactcttggagtgggagccctgaaaccacgagaggaaccaaaccacaggtcatctgctaaggatatacacatgacaccatccactgacttctataagaaattagccttggactgttctggtcagcaagttgctgttgacttattccttctcagtggacagtattctgatttggcttctctgggttgtatttctcggtattcagcaggtagtgtctattactatccctcttaccatcatcagcacaacccagtccaagtacagaaattacagaaggaactacagagataccttactcggaagattggctttgaggcagtcatgaggattcggtgcaccaaaggtctttccattcatactttccatggaaacttctttgttaggtcaaccgacttactgtctttgcctaacgtcaacccagacgctgggtatgcagtacagatgtcagtggaagagagtcttactgacactcagttggtttcttttcagtcagcactcttgtatacatccagcaaaggcgaaagaagaattcgtgttcatactttgtgtttgccagtagtttcgactctgaatgatgtctttcttggagctgatgttcaagcaatttcagggttattggccaatatggctgttgacagatctatgactgccagtctgagtgacgctcgggatgctctagtgaatgcagtcattgactccctttcagcttaccgttcttcagtcttaagtaaccagcagcctggactcatggttcctttttctttgcggcttttcccactttttgtgttggctctccttaaacagaaatcattccagactgggacaaatgcacgtctagatgaacgcatttttgctatgtgtcaagtgaaaaaccagcccttggtttaccttatgctcacaactcatcccagtttgtatagagttgacaatctctcagatgagggagcactcaacatcagtgatagaaccatacctcagccccccattcttcagctttcagtggagaagctgagcagagatggagctttcctcatggatgcaggctctgtactgatgctttgggttggaaaaaattgtacacagaattttctcagccaagttctaggagttcaaaactatgcatcaattccacagcctatgacagaccttccagaacttgatacaccagaatctgccagaataatagctttcatctcttggcttagagagcagagaccatttttcccaatactttatgtaataagggatgagagtccaatgaaagcaaacttccttcaaaacatgatagaagacagaacagaatctgcattatcatattatgaattcctgttgcatatacagcaacaagtgaataaatgaatgaatgaagaaatttgacttatttttaaggaatgtcacgatagtgcagaatacctggaaatgtgtaataccttctttttctattatgtttgtggactaatgtgatgattgagatgttctcactgtgatttcaacaacctatagcaaataaaagaccacagcagagaatcaaacatgcaactctgaaatactgtatttttcaaatcagaatatagctacgtatgattggatacttttttcttgccaattatgtttgagttgttatggattaaaataagaatattgcagaggcaaagtacattttgtaaaataaagatttctgtgttctacatgtatatttctcatttttaatttttctgaatctttggctgctacatttaaaacctcacaaacctaagtgttgcagggaagttacaaattgattggtagtgatgtttttaaaataaaaacaatggaaagtaaatataatgtaggaaaactagaattcattccccacacgtgtcttttttttttctttgttaagggaaaggatcatgttgactaaaactaaactaattctagtatagcttgagaaaaatatgaagaaacacattcaagctttaaaatctgtcagtattctttatgcttgaagaacaaagtcactttgatttgaagtgagaactatcattaggtggttttctgatttcctgatgaagagttggacatactgtcttaatctatagtgaaaagaatttgagctgtcttcataaacactgggactagcaatgataatagggagatacgaaactttaattatcttgatcctttaagtggattttatttggtgcatttctgctctgggtatataataaaagtgggggtttttggtgaaatgagtgaagaaatgaaaggtttctaaagtgctatccaaatacatcagtaacatttttctaaggagtttaattgttaaattggaagtcattcataagaaatatttatgcttgaatatgaaaatctatgaaagcataaatgctgctgtttgatttggtggatattaagattatacacatccaacatattaaagttatgaaagaaacttgacttctgaaaatccttaagagactgctttcttgattcagctagagaaatattatagtcaaaactattgagtgaattttgtttacaaataggtaaattatacatttgtatatttaaagtgctgtgacatagtatctttaagagtttggctcagttttcacagattcattttgtcttaagaatttcttaaatatgttcatgtataatacttgatcaaaatatttttgggttttttgttttgttttaatgggttagaaaatgtttacaatcttggtcttatatgatcaccaatggaatagtaacttccaggtttatatcaatatgagctgactttaactgagttgtttgggatagggaagaagcagtccctctacagtatacaactactgcttgccagctggatcaaaataatcatgttttatgaaaatatctcccttaagcagtgttaaggttggtttgcagtgtgtaagtggcacattgaactggaagttttcttgaaagctgcttcatctattaagaagcaattttcaaattgtagcgaattatattatcccctcttttaaagaaacagtcgttatatgctgatgtttcttaaaataactaaaatgttcctcttaatgtgattttaaatggagttatttgtaggtcctttcttagtagtaaagaatcttctagagggaaacatttgtgcttttagggataatcttccttgtgcctcactacatccctaagtgggtatgactcttgttattaccacatgcttttttagtatatttcacaaatttacttttaaatattattttagatacggtgtaacatgtgcaattcagaataattttataacaggtcatgaaaaacataactttagttaggattcacaatatttgttctccacataatgagagaatgaatgagcctttggagatactgatataaggcaattattttttgcaatgttgaatgtgttttttagtttgattctttttttttcccccaatagggcactacctgccatatcatcttgtattactttttgatgtaaagcgactaatatttacactatgccatattttttttaattatagttgtaaattatgaaagatccttgaattttctacagatctacaactactaatgtaacagacaagggcaatcttggtatttaaatctgagcatggcagttctaccataaaaagtactctatttttctaatttctaggatttttaaaataacatttctgtaagtctgacatactaatagtcactcaagcagtaccatttattttagtttgcatatattttcactgtttttaatttaatgtattgagtctaatagactgttttgcaataattagaataaagatttatttcttctaatcaaagatgcataacagctattatctaggggaccaccaaatgtgatttcaaaattttgttaactattacaaatgtaatccttatatagaaattttaattttgtaaagtagtgtataatattgtaatattaaattcttgttcttaaattcaaatatgtattgatcttcaatgtgctgtgttaaatcttgcttctctgaaaagttggagacaagatttgtcttcctttttacagtttgtaattttcactgttttattcctgttaaaaaaaaaa

SEQ ID NO: 569 - DNA, 478 bp, Homo sapiens
  CDS (15)..(239)
attattgaaagcctatgaatttaaaaccaggtttaccatgtaatttgtttttaaatttatgtatactagcctggcctttctccaagcaaattattgaactattagaatatgttagttatcatccttgggtcttagtatatagggaatacagaaacatcagcattgtatacacatattttcactttaactcaagaattccaggaggtaatttgttgatattacaatttttaacacatttatgattctgtgataatattattcaattgcatatatttcagaggaaagtaccagtcagtaaagaaaaatgccaactaaacatgaaactattgatcaatacttatatacctttaatttttcctatttgaaaagccaaccacttaacacattactcatagcacctaagacagtgccttgcatactggagtcatctattattattgtttaattagaatattaaaccctaccctttaactcagca

SEQ ID NO: 570 - DNA, 1330 bp, Homo sapiens
  CDS (269)..(1327)
ggttccgtcatgattacattttgcgaactatagtataaatcactctaatgatattgactcttctgtgttctgtttttatatatttccctagctttgcttgtatttacttgttgcatgtgtgtaagccctgagttttataggtttgatttgtggatctgttgtgcggttgagccctcattcattcacctgcttctctgcagttggacacacaagcaattgcctttgcacgaacagggacaatcttaatttctggttaagatgaaaaaatatggttgcagacacattaaaacttctgtctccactgatgacaagatacttctttctgcttttttattctactgattcttcagacctcaatgaaaatcaacatcccctagattttgatgaaatggcttttggaaaagtaaaatcagggattagcttcctcattcagactggagttgggatcctgggaaattcctttctcctttgtttttataacttaattttgttcactggacacaagctgagacccacggacttgattctcagccaactggccttggctaactccatggtccttttctttaaagggatacctcagacaatggcagcttttggattgaaatatttgctgaatgacactggatgtaagtttgtcttttattatcacagggtgggcacaagagtttccctcagcaccatctgccttctcaatggattccaagccattaagctcaaccccagtatatgcaggtggatggagatcaagattagatccccaaggtttattgacttctgttgtctcctctgctgggccccccatgtcttgatgaatgcatctgttcttctattagtgaatggcccactgaatagcaaaaacagtagtgcaaaaaacaattatggatactgttcttacaaagcatcaaagagatttagctcattacatgcagtcttatatttttcccctgattttatgagtttgggcttcatggtctgggccagtggctccatggtcttcttcctctacagacacaagcagcaagtccaacacaatcacagcaacagactctcctgcagaccttcccaggaagccagagccacacacaccatcatggtcctggtgagctccttttttgttttctattcagtccatagttttctgacaatttggacaactgtagttgcaaacccaggccagtggatagtgaccaactctgtgttggtcgcctcatgtttcccagcacgcagcccttttgtcctcatcatgagtgatactcatatctctcagttctgttttgcctgcaggacaaggaaaacactctttcctaatctggttgtcatgccatga

SEQ ID NO: 571 - DNA, 2240 bp, Homo sapiens
  CDS (1)..(1779)
atgcagggtgagcggaagcaatttgctgtggtgcttcttagcctgagacttttggctaaattcctgggctttgtggctttcctgccataccgggggcctgaacctcccccgaccgggacctgccccctgactgagctctggccctcccaggtccctccggtcctggatgtgcggactctgctgcagcgagggctgcaggcccgccgggcggtgctcaccgtgccctggctggtggagtttctctcctttgctgaccatgttgttcccttgctggaatattaccgggacatcttcactctcctgctgcgcctgcaccggagcttggtgttgtcgcaggagagtgaggggaagatgtgtttcctgaacaagctgctgctacttgctgtcctgggctggcttttccagattcccacagtccctgaggacttgttctttctggaagagggtccctcatatgcctttgaggtggacacagtagccccagagcatggcttggacaatgcgcctgtggtggaccagcagctgctctacacctgctgcccctacatcggagagctccggaaactgctcgcttcgtgggtgtcaggcagtagtggacggagtgggggcttcatgaggaaaatcacccccaccactaccaccagcctgggagcccagccttcccagaccagccaggggctgcaggcacagctcgcccaggcctttttccacaaccagccgccctccttgcgccggaccgtagagttcgtggcagaaagaattggatcaaactgtgtcaaacatatcaaggctacactggtggcagatctggtgcgccaggcagagtcacttctccaagagcagctggtgacacagggagaggaagggggagacccagcccagctgttggagatcttgtgttcccagctgtgccctcacggggcccaggcattggccctggggcgggagttctgtcaaaggaagagccctggggctgtgcgggcgctgcttccagaggagaccccggcagccgttctgagcagtgcagagaacattgctgtggggcttgcaacagagaaagcctgtgcttggctgtcagccaacatcacagatggtgatgagagtgcggtggtgaatggcttgatagcaaatgagtctctaggaggcagtcgccccagtatttggagacaatttcagaaatgttctatgtgggaggacgtgctctccttggccgtggggccacgggaccctgacgagggagtctccccagagcatctggaacagctcctaggccagctgggccagacgctgcggtgccgccagttcctgtgcccacctgctgagcagcatctggcaaagtgctctgtggagttagcttccctcctcgttgcagatcaaattcctatcctagggcccccggcacagtacaggctggagagagggcaggctcgaaggcttctgcacatgctgctttccttgtggaaggaagactttcaggggccggttccgctgcagctgctgctgagcccaagaaatgtggggcttctggcagacacaaggccaagggagtgggacttgctgctattcttgctccgggagctggtggagaagggtctgatgggacggatggagatagaggcctgcctgggcagcctccaccaggcccagtggccaggggactttgctgaagaattagcaacactgtctaatctgtttctagccgagccccacctgccagaaccccagctaagagcctgtgagttggtgcagccaaaccggggcactgtgctggcccagagctagggctgagaagtggccctgccttgggcattgcaccagaaccctggacccccgcctcacgaggaggcccaagtgcccaatgcagaccctcactggttggggtgtagctgggtctacagtcagacttcctgctctaagggtgtcactgcctggcatcccaccacgcgaatcctagaggaaggagagttggcctgatttgggattatggcagaaaagtccagagatgccagtcctggagtagaagaggtggtgtttgtttatctcttggatactaaatgaaatgaggtgtgtgggcttgtcaacacagaattcaagcctcatttgctatcccagcatctcttaaaactttgtagtcttggaattcatgacagaggcaaatgactcctgcttaacttatgaagaaagttaaaacatgaatcttgggagtctacattttcttatcaccaggagctggactgcca

SEQ ID NO: 572 - DNA, 1577 bp, Homo sapiens
  CDS (277)..(1095)
tgctccagtgtgcctggtgccggggccgtggggaggaggcgatttcgctccctgcggctgggctcggaccgggcgcccgagcctcctcggccttggagagcagcggcggcgggggaccccgggcgcggcaatactgaacactgcgcagcttgcagaggtctcctggcagccctcattaggaattctgtctggccccgatcagaatactggagacgagaccacgagattgatgagtttgccttgggagtcggtaagaaggtgaagccaggggcgaacatgggtcagaaggtcactggagggatcaagactgtggacatgagggaccccacgtacaggcccctgaagcaggagctccagggtctggattactgcaagcccacccggctggatctgctactggacatgccccctgtgtcctatgatgtccagctgctgcattcatggaacaacaacgaccgatcgctcaatgtctttgtgaaggaggacgacaagctcatctttcaccggcatccggtggcccagagcacggacgctatcaggggcaaagtcgggtatacccgtgggctgcacgtgtggcagatcacgtgggccatgagacagcggggcacacacgccgtggtgggggtggcgacggcagacgcccccctgcactctgtcgggtacacaaccctcgtggggaataaccacgagtcctggggctgggacttggggcgcaaccggctctaccacgatggcaagaaccagccaagcaaaacatacccagcctttctggaaccagatgagacattcattgtccctgactccttcctggtagccctggacatggacgacgggactctgagcttcattgtggatggacagtacatgggagtggcttttcggggactcaagggcaaaaaactgtatcctgtagtgagtgccgtctggggccactgtgagatccgaatgcgctacttgaacggactcgatcccgagccgctgccgctcatggatttgtgccgtcgctcggtgcgcctggccctggggagggagcgcctgggggagatccacacgctgccgctgccggcttccctcaaggcctacctcctctaccagtgacgttcgccatcataccgccagcgcgacagccacctggtgccaactcactgagccgcctgccgctggggccgccgcaccctgcaccttggaccggcatccgtagccatggacagaggtccctggtcttccctcatcctccgtggctgcctccatgggacaaggaccgattccaacacaggctcctctttcccccttcccgacatcagcggaaggcagcatccctgcatgccgtccatatacaacccctctttgaaaaaagacacagagaataaactcctacgaaagccctacattgagctccaatctgctcggggtgggacgggtgcttcccacacctttgggaccctcgaccccacccttctttcctaccagcccagagccttgtggcttgtacagttttgaaactcccgttctattttatgatggttgataatagtcagtaacctaataaaggaacgtttgttaaaatatcaaaaaaa

SEQ ID NO: 573 - DNA, 1689 bp, Homo sapiens
  CDS (116)..(1657)
ctaggcagcatcccagtggacttgagtctggaatgcagatgtaggagagtctggcattacaccaccaccccctagcctcaccatcctggtaacagtaccctctgcttctcctgggatgtcacagctgggaaaccccaccttgccagcctccagcatgcaggataccgtaacgacatcagcattgttggaccccagccactcctcagtctccacccaggacaattcctccactggaggacacacttcaagcacaagcctacagctctcaaagccttcaatcacaccagtccctgcaaagtccaggaacccacatcccaggcccaatatccgtcggatgcgccggatcattgctgaggatcctcactcctcactggccatcgtgcccctcctcacacagctctgcattcagcacattatcaggaacttccacaaaaaccctatcctcaagcagatgctcccggaacaccagcagaagctcctgaaccacctctcccctgacctaccactggctgtgaccgccaacctgatagacagtgagaactactggttccgctgctgcatgcatcgctggcccgtgtgccacgtggcccaccatggcggcagctggaaacgcatgttcttcgagcggcacctggagaacctgctaaagcactttatcccaggcaccacagaccctgcggtcatcctcgacctgctgccgctctgccggaattacgtgcgcagggtccacgtcgatcagttccttccgccggtgcagctcccggcccagctccggccgggcgaccactccgactcaggcaggcagccacagatcgagcagcccaccgttgaccactaccaactgggcgatctgctagctggcctgagccacctggaggagctgcacctggtctacgatgtcaagcactgcggcatgaatttcgagtggaatctcttcctcttcacctaccgcgactgcctctccttggcagccgccatcaagccatgccacaccctcaagatcttcaagctgacccgaagcaaggtggatgatgacaaggcacgcatcataattcgaagccttctggaccacccagtcctcgaggagctggacttgtcacaaaacctcattggagaccgtggtgcacgaggcgctgccaagctgctgagccacagccgcctgcgtgtgctcaacctggctaacaaccaggtgcgtgcacccggtgcccagtccctggctcacgctctggcacacaacaccaacctcatttccctcaacctacgtctcaactgcatcgaggatgagggtggccaggctcttgcccatgccttgcagaccaacaagtgcctcaccacgctgcacctcggtggcaatgagctgtctgagcccaccgccacactcctgtcacaggtgctcgccatcaacaccacactcaccagcatcaacctgtcctgcaaccacatcgggctggacggtgggaagcagctcctggaaggcatgtcagacaacaagaccctcctggaatttgacttgcgcctgtcagatgtggcccaggaaagcgagtacctcattggccaggccctctacgcaaaccgagaagcagcccgccagcgggccctgaatcccagccacttcatgtcaaccatcactgccaatggccctgagaactctgtgggataaaatgacctgacttggaaaaaaaaaaaaaa

SEQ ID NO: 574 - DNA, 1702 bp, Homo sapiens
  CDS (141)..(605)
gcccttcccgaccgtagcgagggtgctgctgcgctgggggaaggaaaacgccgctttgactgtgccttgttctcacagctggcgggaagcaagcgccttttcgaaagccagaggctcgagttacccctcttaccaccgtcatggcagtcccaggttgcaacaaggacagtgtcagagcaggctgtaaaaaatgtggctaccctggtcacctgacttttgaatgccgcaattttctccgagtagaccctaaaagggacatagttttggatgtcagcagtacaagtagtgaagatagcgatgaagagaatgaagaactgaataaattgcaggcattacaggaaaaaagaataaatgaagaagaggaaaagaaaaaagaaaaaagcaaagaaaaaatcaaattgaaaaaaaaaaggaaaaggtcttactcatccagttccactgaagaggacacttcaaaacaaaagaaacaaaaatatcagaagaaagaaaagaaaaaagaaaaaaagagtaaatcaaaaaaagggaaacatcacaaaaaggaaaaaaaaaaaaaaaaaaaggaaaagcattcttctacacctaatagttctgaattctccagaaagtaactgagactttggcttaagccgttaaatttaaaaatttgtttttaaaacgtgtttgcccttccttggaatttgctatatattatgctttgcaataaatcacagccttttccatatagacatttttcgtatttgggaccattatccctctggcaatatatttttaatgtgctgtaactgtaaagtattaaatcagtcttgttacttgatagccatgccccaagtatagctatttgtgtatactaaacacatcatttttggtatttgtgtctctgtgtgtttggctagtgttactacttcataagttcattgtaaaatggctttactgccatcaacatgggtcatctacctagcagttaatgagtattgctggatcaggtgtccaccttccaatgatgaagcaaggtaaggggtaatgttttgctcttgacacagagaaatttaatagctttatgtactaaaatataatatcttttaaagatagtgaaattcttcagttttttaaatctctagggattttttttcaatgttgtagaagatgcagctgcttaatggtcttgactaggactttttaaatgaatggtgtctgcaggtagatgatcatgaaaatatctctaacaaagttttactcttctatgaaatgcagaatttctagtacctgcctcctttgtttttgtaataattaaaatacttcttgtataaagagattagttcagcctgttagtaagtctgcagagatgatgctgagttggttgtgatttttagaatagactcctgggttgttttacaaatgtgccatattggcatgtcttacagtgatacctcaaacacagaaatttttatttaggaagatagctaaatctttattagaactgatttttattgtattcagtataaattttatgaagcttgtttctatgagtactgtggaaaattttataaatgtgagcatatatatttattttgtctgacataatttgtagttttaaagcaagtttcacactgaacttaacgttttcataaatgaccagtttgggatgtttctctcttttactttagtggcaaactcaagagtaaaaagtgtcaaaaaaaaaaaa

SEQ ID NO: 575 - DNA, 374 bp, Homo sapiens
  CDS (72)..(323)
aaatctttgcctacagtgagggaaactactaaagttcctggggaagcaaagtagaatttcataagaacaaaatggatggagaggagaaaacctatggtggctgtgaaggacctgatgccatgtatgtcaaattgatatcatctgatggccatgaatttattgtaaaaagagaacatgcattaacatcaggcacgataaaagccatgttgagtggcccaggtcagtttgctgagaacgaaaccaatgaggtcaattttagagagataccttcacatgtgctatcgaaagtatgcatgtattttacgtacaagggttcgctacactaacagctccaccgagattcctgaattcccgattgcacctgaaattgcact

SEQ ID NO: 576 - DNA, 2466 bp, Homo sapiens
  CDS (8)..(1489)
gacgaagatggcgactgaggcacagagtgaaggggaggtgccagcccgcgaatccggccggagtgatgccatctgcagttttgtgatctgcaatgattcttcccttcgaggtcagcccattatctttaatcctgacttttttgtggagaaactccgacatgagaaacctgagattttcactgagttggtggtcagcaatatcacaaggctcatcgatttacctggaactgagttggctcagctgatgggggaagtggaccttaagttgcctggcggggctggcccagcatcaggattcttccggtctctcatgtctctcaagcgaaaggaaaaaggagtgatatttgggtccccactgacggaggaaggcattgcccagatataccaactgattgagtatctacacaaaaacttgcgagtagagggtttgtttagagtaccgggtaatagtgtccgacagcagattttaagggatgctctcaataatggaactgacattgacttggaatcaggggaatttcactcaaatgatgttgccactttgctgaagatgtttctaggagagttgccggagcctctgctgacacataaacacttcaatgcacacctcaaaatcgctgatttgatgcagtttgatgataaaggaaacaagaccaatataccagacaaggaccggcaaattgaggctctccagttgctcttcctcattctccctcctcctaatcgtaatttgctgaagttattgcttgatctcctataccagacagcaaagaaacaagacaagaacaagatgtcagcctataaccttgcccttatgtttgcaccccatgtcctgtggccaaaaaatgtcactgcaaatgaccttcaggagaatatcacaaagttaaacagtgggatggcttttatgattaaacactcccagaaactttttaaggctcctgcttacattcgggagtgtgcgagattgcactatttgggatccagaactcaggcatcaaaggatgaccttgacctcatagcttcatgtcatactaagtcctttcagctggcaaagtctcagaaacggaaccgggtagattcctgccctcaccaggaggagacccagcaccatacggaagaggcactgagagagctgtttcaacacgttcatgatatgccagagtcagcaaagaagaaacaacttattagacagtttaataagcaatcattgacccagacaccagggcgagaaccttctacttcccaggtacaaaagagggctcgttcgcgctccttcagtgggcttattaagcggaaggtcctgggaaatcagatgatgtcagaaaagaaaaagaagaaccctactccagaatctgtggccattggtgaattgaagggaaccagcaaagaaaataggaacttattattttctggctctccagctgtcacgatgacaccaacaagattgaagtggtctgaagggaagaaagaggggaaaaaaggatttctctgaaggatccagagttgtctcctatggtccatgcagaattttctgtttagtgggcaggtgttattcctgcccacagcaaagcttggacttgcagcttgcttgctgcattttgaattgtcaaagccaactaataccgtgacccgactgatacctctaaccccactcactggatgatgtttgcaagctgtgccttctgagagagtgcttaggccctgtctctcttttttaatattatggggaaaccactaactatccaaccagcttatacagcacactaaggtgggcttcagtgctcactcaatgtgtttaggcagattccacttttgaaaaaaaatatgaaatgtgtgctcaactgccagtaattttttaaaaagcactgtcccagtggattgatgttgtttttaatggatattttgggtttttctctgttttgatagtattgggtatttggttgtttttgtttgtttatttctttgttttaaaagccatgtttttggttgggctctaagctagatatctttccctctttttcactttgagctttgggaaaactctttatcttatgaggctgtattcctcaatacctaatttgtgtccaaagaatttatagcttttctggacattttttattatttcttgggtgtgacatcagagtatttgacctgcagtattgaaaaaggagaattcaagaatgatacagtattttaacaaatcttaattattaaactcttttccttccttccatttctccctcccttgtccatctctctctctctttccctttcctcagtgatgtgaaaataattgtgttttgctgaacttgttatcttcattcaatttcctcttgactaaaacatctctggtgccaacgtaatacttaaaaaccacatcactgtgactcaaggaaagtcactgacagcataagagaagtttgctaaaatatttgtatgtggggttaggtgtgggggatcctctaa

SEQ ID NO: 577 - DNA, 2043 bp, Homo sapiens
  CDS (222)..(623)
ggttggggcggggcgcacgggggagggggccaggtcggagggaagcccgcccgtgcccgagcccgcgcccgagcagggactacatttcccgggggcctcggcggcggctgcggcgacgggcgcggcaacgtcccccggaagtggagcccgggacttccactcgtgcgtgaggcgagaggagccggagacgagaccagaggccgaactcgggttctgacaagatggccgggctgccccgcaggatcatcaaggaaacccagcgtttgctggcagaaccagttcctggcatcaaagccgaaccagatgagagcaacgcccgttattttcatgtggtcattgctggccctcaggattccccctttgagggagggacttttaaacttgaactattccttccagaagaatacccaatggcagcccctaaagtacgtttcatgaccaaagataagtggtccccagcactgcagatccgcacagttctgctatcgatccaggccttgttaagtgctcccaatccagatgatccattagcaaatgatgtagcggagcagtggaagaccaacgaagcccaagccatagaaacagctagagcatggactaggctatatgccatgaataatatttaaattgatacgatcatcaagtgtgcatcacttctcctgttctgccaagacttcctcctctttgtttgcatttaatggacacagtcttagaaacattacagaataaaaaagcccagacatcttcagtcctttggtgattaaatgcacattagcaaatctatgtcttgtcctgattcactgtcataaagcatgagcagaggctagaagtatcatctggattgttgtgaaacgttttaaaagcagtggcccctccctgcttttattcatttcccccatcctggtttaagtataaagcactgtgaatgaaggtagttgtcaggttagctgcaggggtgtgggtgtttttattttattttattttattttatttttgaggggggaggtagtttaattttatgggctcctttcccccttttttggtgatctaattgcattggttaaaagcagctaaccaggtctttagaatatgctctagccaagtctaactttatttagacgctgtagatggacaagcttgattgttggaaccaaaatgggaacattaaacaaacatcacagccctcactaataacattgctgtcaagtgtagattccccccttcaaaaaaagcttgtgaccattttgtatggcttgtctggaaacttctgtaaatcttatgttttagtaaaatattttttgttattctactttgcctttgtacagtttattttactgtgtttatttcattttcccaatttgacaatcgtattttaaaattgaaactgatggaacattctttcttggtcttcaccatctgacaaattgaatggcaagaggtggattttgccagtttcttttcactgatgcagatttgtgttaagatagtactgaatggagtatttataaactggccctgagcatgcataaagcatcagtatctgacctttttttaaccttctaggaatttgaaataaatgtgtttgtgttgtctgattagatgatcattggtgtcttgccacaatgtttaaaaattactgtacaggaaagtcacagcaaagatagcagttgtgactgacatgtaggactttcacagttgtgccacatttttgcctaaaatttgggttatgacatttttcttggttcttatctgaaaatttcatctgtaacctttcatgtgtgttaagaaacactgatctgatcatttgggatttgctgaggcatttgtgagtcttccttataaacctgatgagcagatctcaactatctagcttgtgtgtcatcagaaaggtttatccctttgagagtatcaagtcctcagttaatgattcttgctttcatccctccagtatttgctgtgggagctcgttttattctttaactccggaattcagtaattgtcttctttattgacgaattcctcccctcaaaaaactgtctttcc

SEQ ID NO: 578 - DNA, 1325 bp, Homo sapiens
  CDS (554)..(874)
gaggagcagcgtacacccgtcaccagaacatctcttgtgtcatgacatgggggtgcaacgggggcctcacagcacagagtgaccgctgcctggcgttccccagcactcggtgtggaaaggcccctacctgctgtaagattatgggtccatgaaagcagtaagctggacacagaggtgtagtgtgcgggacagagggccttgcagatgcctttctgttggtgttttagtgttaaaatacggagagtatggaactcttcacctccattttctcagcggctgtgaagcagcctcctagcttcggaagtacggacactacgtcgcgttttcaagcgtgtctgttctgcaggtaacagcatcaagctgcacgtggaagcatctcgcggttttctagaaacaggcattttcttatccctctcccgctcctttttccacaaaggtgaatttcataaatgtaatactagtaaagtgaatgaattactgagtttatacagaaatttaggtaacttctcctttagtctcaagagcgagtcttgctttttaatgggtgccgtttatgttgctgcccgccctgtgtgcctggctcctctgggtgccttggtgtctgctggtggctggcagtgggcgcagcggaggagagttgtgctgcagctcatacggtgtgtctgtcatctcagtctggagtaaatgcagtgtctgccggtgtctgatgggttctgtccctcgtattttctttgccttctatcccattgcctggctaccgctgcctggcagccaagggtgttggtcgcgaagctggagtggcctctggtggagcctgcatcttgtctcgtctgcctctgctttacatttggtgtactttcgggcgtggtggcagtaaaatgacaccgtgattgagcttgtcagcagagctgaaagagaaagtagaaggatgtgcattgtttcttgtaagatatcttgcatgtatctgtgtattcaaattcaaacagagatggtttgtccatttgtccactgagaaattataaactagggacaagggggaggaaaagtactgaaatacagtttatgaagcaagtgtgtctcgggctgtgcttgtcccaggagccccagcagcatctgaactgaggcttcttcagtcctgcaggaacaggatcatctgtctcagcggtgggcagatgttttcatagacagccagggagtaaacactgttggctctgtgggctgtatggtctctgccataaatagtacagagatgtggctgtgtctagtacaacttttagacacagaaatctgaatgacatatattgttctgtgtcaagaaacttaga

SEQ ID NO: 579 - DNA, 1664 bp, Homo sapiens
  CDS (12)..(1661)
tttcgtaaaggatgggtttcaatgtaattaggctactgagcggatcagctgtagcactggttatagcccccactgtcttactgacaatgctttcttctgccgaacgaggatgccctaagggctgtaggtgtgaaggcaaaatggtatattgtgaatctcagaaattacaggagataccctcaagtatatctgctggttgcttaggtttgtcccttcgctataacagccttcaaaaacttaagtataatcaatttaaagggctcaaccagctcacctggctataccttgaccataaccatatcagcaatattgacgaaaatgcttttaatggaatacgcagactcaaagagctgattcttagttccaatagaatctcctattttcttaacaataccttcagacctgtgacaaatttacggaacttggatctgtcctataatcagctgcattctctgggatctgaacagtttcggggcttgcggaagctgctgagtttacatttacggtctaactccctgagaaccatccctgtgcgaatattccaagactgccgcaacctggaacttttggacctgggatataaccggatccgaagtttagccaggaatgtctttgctggcatgatcagactcaaagaacttcacctggagcacaatcaattttccaagctcaacctggccctttttccaaggttggtcagccttcagaacctttacttgcagtggaataaaatcagtgtcataggacagaccatgtcctggacctggagctccttacaaaggcttgatttatcaggcaatgagatcgaagctttcagtggacccagtgttttccagtgtgtcccgaatctgcagcgcctcaacctggattccaacaagctcacatttattggtcaagagattttggattcttggatatccctcaatgacatcagtcttgctgggaatatatgggaatgcagcagaaatatttgctcccttgtaaactggctgaaaagttttaaaggtctaagggagaatacaattatctgtgccagtcccaaagagctgcaaggagtaaatgtgatcgatgcagtgaagaactacagcatctgtggcaaaagtactacagagaggtttgatctggccagggctctcccaaagccgacgtttaagcccaagctccccaggccgaagcatgagagcaaaccccctttgcccccgacggtgggagccacagagcccggcccagagaccgatgctgacgccgagcacatctctttccataaaatcatcgcgggcagcgtggcgcttttcctgtccgtgctcgtcatcctgctggttatctacgtgtcatggaagcggtaccctgcgagcatgaagcagctgcagcagcgctccctcatgcgaaggcacaggaaaaagaaaagacagtccctaaagcaaatgactcccagcacccaggaattttatgtagattataaacccaccaacacggagaccagcgagatgctgctgaatgggacgggaccctgcacctataacaaatcgggctccagggagtttccaactgctaaaaatctcagtaccacaatgcgctttgaaagtcatattacactacctatttttattttgaataacagactcctggtggactttccggaaatagaatctaaatttccataa

SEQ ID NO: 580 - DNA, 2948 bp, Homo sapiens
  CDS (125)..(1381)
gcttctggctgcgcggcctgcgcgcgcctcccgggcggattccagccccgagcgggacagcgcggcggggagcgacgagatttctctctgatcaaacggacagttcaggactcagaatctaaggatgaatgttcaccgtggcagtgacagtgacaggttattgcggcaggaggccagctgcttagtggatgatactttagctgtagcccaagaaaaagaagcaaacagcctggcttcatctggtcctcataatcttacttatcctctaggtcccaggaatgaagacctctcacttgactatgcctctcagccagcaaatcttcagttccctcacataatgccccttgctgaagacatcaaaggttcttgcttccaaagtgggaataaacggaaccatgaaccttttattgctccagaaagatttggaaacagtagtgtgggctttggcagtaattcccattcccaagcaccagagaaagtgacgcttcttgtagatggcacacgttttgttgtgaatccacagattttcactgctcatccggataccatgctgggaaggatgtttggaccaggaagagagtacaacttcactcggcccaatgagaagggagagtatgagattgctgaaggcatcagtgcaactgtatttcgcacagtgctggattattacaaaaccggtatcatcaattgtcctgatggcatctctatcccagatcttagagatacttgtgattatctctgcattaattttgacttcaacactatccgatgtcaagatctgagtgctttactccatgaactgtctaatgacggtgctcataagcagtttgatcactacctcgaagagctcatcttgcccatcatggtgggctgtgccaagaaaggagaacgagagtgccacattgttgtgctgacggatgaggattctgtggactgggatgaagaccaccctccaccaatgggggaggaatattcccaaattctttatagctccaagctctacagattcttcaaatatattgagaatagggatgttgcaaaaacagtgttaaaggaacggggcctaaaaaacattcgcattggaattgaaggttaccctacctgtaaagaaaaaaaaaaaaaaaggcctggcggccggtctgaagtcatctataattatgtacaacgccccttcatccagatgtcatgggaaaaggaagaagggaagagtcgccatgtggatttccagtgtgttcgaagcaaatccctcacgaatctggtagctgctggagatgatgtcttggaggaccaggagatattaatgcatcacccaccccaagtggatgaacttgaccggctaaatgccccactttctcagatggcttctaacgactttcaggattagggccagctgtgggtctactccttgttggagcccatctcacctgggatgcctgcagccagccctccctcgtgatttgtctcaccttgagtaggagacatgcttctcccctaaccttttcctttctgccataattaacatatgtccttttcagtaagtccatgcctctggcaggggatgaagaagtactcactggtaattagctaccatctttgcagcagccctggtaacttgaaaaatttgggtctggtgctgttcattgagtctttgtgtaactgcaaaagcaggaaaggaagtcaagactcctgttgcctcgtgcttagcaaagcagtccttatcctttatactctgttcttgggttttgtttttgtcttgttttataccaggcaaattgcttagtagcaaagggaccaaactgaaaaggtgacaatctctaacttctaaaagcagacaccaatcggatgctcattagaggttaatgaagatgccattcttggtggcctctgcacccaaattgcatctggaaagaactagggtctcattcagaatgtccaaaaggaaattcttaagagcttaaattcagatttgtgtctcattaatgcagtgaacaattcaaaaccacacagattccttggcaggaaggataatggaataacagtgttgatgagacctttttagcttcaaggtttcggagtctaaacaaatggatgattcatttggaatgaaactcacaatgcaagtagaaggacctctccaaatcaggccagttgggttatcctggcttggaatctggtgtgaaaccataggtcttaacactctggagcagcacattgctgtggatatgtccaggagaccttagatatggcttaaaggctttcaagatgaggacagaaattgcttacaattgctcagtttctcaacagaaagactcataagagtgccagcatggggtacatggagtgaagctgggtgggaagcatcatctgcacagtccctgtcctagtgcaggacttttctctgtatgttttcataccatgggatttttggatatcagtgtattttggttcttgaaatagcctaatagctgctcacacattgggtaggaatattataccaatgtcatccccaaaggaagggtgagctgaatggaaattaagcccagtcattttatttgatctattagctctgttatcagtgcatgatcacccagatcaccctcctcagcccacacagtgctgaaccatcttccctcctgttctccatggctattaatagtatagctaaatttagagtgcagagccagatataagtattttggaattatctcccagtttgtgggtagaagctgactgggatacagggttgagtatctcttatccaaatgcttgggcccaaaggttcgaattttccgatttgggatcttacactgggccccatctgaagtctgaggcctgtccctccaactgtttgggcccttcgcttggttcgggccccgcgggaggccccaggggtctcccgaaacggtttccggcaaggttctctgcagcgtagggcccccggccggctg

SEQ ID NO: 581 - DNA, 6553 bp, Homo sapiens
  CDS (272)..(5242)
gtccggaattcccggtcgacagtctcccagaacaattcccaggagctcggattccaagagccgcccttgccctcgtttaccttcgctagtcgccctgcagccccgccctgtccggaggccccgccctccatgaatcagctgatcccgcggacccactgggttgccaagctcgcgccggatgcggagcgcggtgctgccggtggagcttcaggtcttgatagactttctgtaaagaaggaatgatttggtgatggagtgttcccactgaccgatggactcaaagaagagaagctcaacagaggcagaaggatccaaggaaagaggcctggtccatatctggcaggcaggatcctttcccataacaccagagagattgccaggctggggaggaaagactgttttgcaggcagccctcggagtgaaacatggagttcttctgactgaagatggtgaggtctacagctttgggactcttccctggagaagtggaccagtggagatttgtccaagtagccccattctagaaaatgccctggttgggcaatatgttattactgtggcaacaggaagcttccatagtggagcagtgacagacaatggtgtcgcgtacatgtggggagagaattctgctggccagtgtgcagtagccaaccagcagtatgtgccggaaccaaatcctgtcagcattgctgattctgaggccagccctttgttagcagtcaggattttacagttggcgtgtggcgaggagcacactctggcattgtcaataagcagagagatttgggcatggggtaccggttgtcagttgggtctcattaccactgccttcccagtgacaaagccgcaaaaggtagaacatcttgctgggcgagtggtgcttcaagttgcctgtggtgctttccacagcttagcccttgtacaatgcctcccttcccaggatctgaagccagtcccagaacgatgcaaccagtgcagccagctcttgattactatgactgacaaagaagaccatgtgattatatcagacagtcattgttgcccattaggtgtgacactgacagaatctcaggcagaaaaccatgccagcactgctctcagcccctccactgaaacccttgacaggcaggaagaagtatttgagaacactcttgtagcaaatgatcagtctgttgctactgaactgaatgcagtaagtgctcagatcacaagcagcgatgccatgtcctctcaacaaaatgtcatgggaacaactgaaatttcctctgccagaaacataccatcataccctgacacccaagcagtcaatgaatacctacggaaactgtcagatcattcagtaagagaggactcagagcatggtgaaaagccaatgccatctcagcctcttttagaagaagcaattcctaatctccacagcccgcctaccacaagcacctcagccctaaacagcctggtggtctcttgtgcatctgctgttggtgtgagagtggctgctacttatgaagctggtgccttgtcactgaagaaagttatgaacttttatagtacaaccccttgtgaaactggagctcaggcaggcagtagtgccattggccccgaaggtttgaaagatagcagggaagaacaggttaaacaggaatcaatgcaaggaaagaaaagttcaagtcttgtggatatcagagaagaagaaacagagggaggcagtcgaagactctccctccctggattgttgtcacaagtttcccccaggctcttaagaaaggctgcacgggtgaaaacgaggacagtggttctgacccccacatacagtggagaagcagatgcgctcctgccttctctgagaacagaagtgtggacctgggggaaagggaaggaagggcagctggggcacggcgatgttctgcctaggcttcaaccgttgtgtgtaaaatgtctggatggcaaagaagtaatccatctggaggcaggtggttaccattctcttgcacttactgcgaaatcccaggtttactcatggggtagcaatacctttggtcaacttgggcattccgattttccaacaacagttcctcgtcttgcaaagataagcagtgaaaatggagtctggagcatagctgcaggcagggattattccctgtttttagtggatacagaagacttccagcctgggttatattacagtggccgacaggaccctacagaaggtgacaaccttccagagaatcacagtggttctaagactccagtacttctctcctgtagtaagcttggatatataagcagagtgacagcaggaaaagatagctatttagccttggtggataaaaacattatggggtatattgccagtctccacgagttagctactacagaaagacgattctattcaaaactaagtgatatcaaatctcagattctcaggcctcttctcagtttagaaaatttgggcactacaactacagtccagctgttgcaggaggtggctagccgattcagcaagctgtgttacctcattggtcagcatggagcctcattgagcagcttccttcatggggtaaaggaagccaggagtttggtcatcctgaagcattcaagtctcttcttggatagttatacagagtattgcacatctattacaaatttcctggttatgggaggattccagcttcttgctaagcctgccattgatttcctaaataaaaaccaagagctgttgcaagatttgtcagaagtgaatgacgaaaacactcagttgatggaaatactgaatactttgtttttcttgccaatcagacgacttcataattacgcaaaagttttgctaaagcttgctacttgttttgaagtggcatctccagaatatcagaaactgcaggattccagttcttgttatgagtgtcttgctctccatctcggcaggaaaaggaaggaagcagaatacacactgggcttctggaagaccttccccggaaaaatgacggattccttgaggaagccagagcgtcgactgctgtgtgagagtagtaaccgagccctgtctctgcagcatgctgggaggttttccgtgaattggttcattctctttaatgatgccctggtccatgcccagttctccacgcaccatgttttccctctggccacgctgtgggcagagccactgtctgaagaagctggtggtgtgaatggcttaaagataactacacctgaggagcagttcactctcatttcatctacaccccaggaaaagacaaagtggctacgagctataagccaagccgtagatcaggctttgagagggatgtctgatctccccccttatggaagtggtagcagtgttcagagacaggaaccacccatttcacgcagtgccaaatatactttctacaaggatcctcgcctaaaggatgccacctatgatggacgctggctttcagggaagcctcatggcagaggggttttgaagtggcctgatggaaagatgtattctggcatgttcaggaatggcttggaagatgggtatggagaatacagaatcccaaacaaggcaatgaacaaagaagaccattatgtgggccattggaaaaaaaaaaaaatgtgcggtcaaggagtctacagctatgcttctggtgaagtatttgagggctgttttcaagataatatgcgtcatggtcatggtcttctacgaagtgggaaattgacgtcctcttctcctagtatgttcattggccagtgggtaatggataagaaagcaggatatggtgtctttgatgatatcactaggggggaaaagtatatgggaatgtggcaagatgatgtgtgtcaagggaatggtgtggtggttacccagtttggattatactacgagggcaactttcaccttaataaaatgatgggaaatggggttttgctttccgaagatgatactatctatgaaggagaattttcagatgactggactcttagtggaaagggaacactgactatgccaaatggagactacattgaaggttattttagtggagaatggggatctgggataaaaatcactggaacctacttcaaacctagtctatatgagagtgataaagacagacctaaagttttcaggaagctaggaaacctggcagtgccagctgatgagaagtggaaagcggtgtttgacgaatgttggcgccaactgggctgtgagggcccaggccaaggggaagtttggaaagcatgggacaatattgctgtggccttgaccaccagtcggcgccagcacagagacagtccagaaatattgagtcgttcacagactcagacactagagagtttggaattcattccacagcatgttggtgccttctctgtggagaaatatgatgacatcaggaaatatttaataaaggcctgtgacactcctctgcaccccctgggcaggcttgtggagacactggttgcagtgtatagaatgacatacgtgggcgtaggagccaaccgcaggttattgcaggaggctgtaaaggagattaagtcctatcttaagcgaattttccagctggtgaggttcttatttcctgagctgcctgaagaaggcagcacaattcctctctctgctcctctgccaaccgaaaggaagtctttttgcactgggaagtcagattcccgatctgaatcaccagagccaggttatgtagtaacgagttctggattattgcttcctgtgctgctacctcggctctacccaccgctggttatgctttatgctttggataatgatcgcgaggaagacatttactgggaatgtgtccttcgactaaataagcagccagatattgctctcctgggctttcttggggtgcagaggaaattttggccagcaaccttgtcaatccttggagagagtaaaaaggttttgccaaccacgaaagatgcttgttttgcctcagcagtagaatgtctgcagcagatcagcacaacatttaccccatcagacaaacttaaggtcatccagcagacttttgaggagatctctcagagtgtcctggcgtcactccacgaagacttcttgtggtccatggatgacttgtttcctgttttcttatatgtggtgctacgggccaggattaggaatttaggctctgaggtacacctcattgaggatctaatggacccctatcttcagcatggggaacagggtataatgttcaccaccttgaaggcatgttactaccagattcagcgtgagaagcttaactaggctgcataacagcttgaaaactggattatctactacagagtgttataacaccatctggagtcttcctgtagtggcaaaaaagaacagtgttgaaattggaaaggactttgtgttatttaggttgttagaatgagccttaccaataataagagccctgagcccagaaaaaaggactgtatagtttaaagggaggattgaaagggaggtaaaaaatcagattagaccagttcttggcctatgataagttccaaaaataccatttatctactatttgaaaaaagaagaggatatcccttcctacagtaaagggtatgtcagctacatgaagttgtaagaaaagcttccagtagagcttcttatattaaagaagttgatggatatttttgaatttctggtttgcctgaatccacctgcagttaccccgatccgtttgcaagaaccagatcgtacttgaaactatagtggccacactctgccttcctgagtcccttccagtcatgtgtgcatcatgtctctttgccaagggaggggagaaaggaacttttaaactgcagttttaactttttctaagctgtttcttgatgggagaggttctgtgcaaaactaccacattctgtccccaaaatgtggaatgcatccaaataggagtcttctgcctcttaacttaaaagaacataggaattttgtttttggtttctttatcatgctacagagagtgaatacactggaattcagacaccgactctgagctgctaggaacctcatttgtccatgtgcaaacgctgtattccaaggcctgtgaatggcagcctgaggaagttttgcatgcaggctgtgttttcgagcaggactaacaactgggaaataagcaaaaaactgcatcgatccccagcctggtgttgttcttccctatacttcacactgaactcaggatgggaagaaaaaggaaacaagctttggctttttccatctcaaaagtattgtggcacctcaacatttcagtgttttgctttttaaaaaatgccctattgtaagttgttggtttatactgtataagtaacactagtagctgttttgaataacataggtgctcttcctcatctcatctcctacaccgtggtgagcatacagagtgtcctgatttgtgttaagtgactgagaagatgttaattacttttgaaaaaggatcatggtttttgctctactttataatcaagacaagtgtttattaaaatactgttttggaatgttggctgtaatgtaacagcaattttcataataaaaggcattcatctttaaaaaaaaaaa

SEQ ID NO: 582 - DNA, 2087 bp, Homo sapiens
  CDS (70)..(489)
catgcgaagggtcagcttggcacgagggctgctcctcgccgtccgcgctgcagtgcgaagggctcgaagatggccggttggcagagctacgtggataacctgatgtgcgatggctgctgccaggaggccgccattgtcggctactgcgacgccaaatacgtctgggcagccacggccgggggcgtctttcagagcattacgccaatagaaatagatatgattgtaggaaaagaccgggaaggtttctttaccaacggtttgactcttggcgcgaagaaatgctcagtgatcagagatagtctatacgtcgatggtgactgcacaatggacatccggacaaagagtcaaggtggggagccaacatacaatgtggctgtcggcagagctggtagagtcttggtctttgtaatgggaaaagaaggggtccatggaggcggattgaataagaaggcatactcaatggcaaaatacttgagagactctgggttctagctgctaggcagactgttaagtattaggggaaaattgctcttaaactttcctagctataagcttaagtcttaattctggaaattttattagcaatgcagggtgatggggtatgaacctgtgtctcctttgtatccctctgttggtggggaaaggtgtctttctttctgccctccccccccaaaataattctgttcacttttgttttgtttccttgtgtactccagcattggttatagtcatgggaaaggaaggtgtccacggaggcacacttaacaagaaagcatatgaactcgctttatacctgaggaggtctgatgtgtaacgcagcctctccccatctacctagcaactgtcttcatcaacaaccctaattatggtcacaatgctaccaaactgtagatggtagctaatttttctttacctattttctaatgtcatgattcctgtttgcccaatggatcatttgtatgttaaccactgtatgtaaccaacccttatctggcaacataattgcagcacaataatgatttgcatgataccttgaaattggggggagggggcatgccaagttgggcatcactttgtcttagcaattaatgggatattgattactaaaataagttaatattaagcaaggtgccggttgtacaatctctgatcagtgtcttttcagcactttgagcatttacttggctcatttagtcttccttttgtagcgcatggttgggaggaaaaagtgcatgcatcattccttcactcttctctttttcccgcccccccctcccttcgcacataggcatttggtttgcttccatctttttttatgcagtgcctgtttttttttaaccaattaaaatcccttttgttgatgagctattgagagctgcagtagtttgcttttagtattgttgttgcacttgagcagagacaaacctttattcatagtgtctacaggacatatgaagagtgcaatggcaaaacaagagcaaaaagcacttcctcccatgaccttacagtaaccatactgattgaatccccagggacattccatcattgcaatagctcagatttttcttcctttttctttgcacaccagctctactctttagtaaaattgtaaaaggctgccattatggacattaggtatcccaacataaccatctggagtgtgtccagtttgttcttcataggaccaatttttatttgcagcttgagtttttatatgaagttgcattattgtggacttggctgtcttgtgatgaatttttttcatatgtattctgtgccatactattgttaaaatgaactgttgctattgtgagatggattttaactgacctattaagggtttctttcgaatggcactactttagggacattccagtatttgcttctattgtttgggccttgtggataatggacagatttaaaaacaaatcttgttggtgatttgtccatttctttccctgccctttgttacatttgggaaacagtttaactcatttgatttaatatgcatttaaaaaaatgccataactattaaaccccttgtttacagacagatgaaataaatttattccaacccaaaaaaaaaa

SEQ ID NO: 583 - DNA, 2039 bp, Homo sapiens
  CDS (70)..(441)
catgcgaagggtcagcttggcacgagggctgctcctcgccgtccgcgctgcagtgcgaagggctcgaagatggccggttggcagagctacgtggataacctgatgtgcgatggctgctgccaggaggccgccattgtcggctactgcgacgccaaatacgtctgggcagccacggccgggggcgtctttcagagcattacgccaatagaaatagatatgattgtaggaaaagaccgggaaggtttctttaccaacggtttgactcttggcgcgaagaaatgctcagtgatcagagatagtctatacgtcgatggtgactgcacaatggacatccggacaaagagtcaagtggtctttgtaatgggaaaagaaggggtccatggaggcggattgaataagaaggcatactcaatggcaaaatacttgagagactctgggttctagctgctaggcagactgttaagtattaggggaaaattgctcttaaactttcctagctataagcttaagtcttaattctggaaattttattagcaatgcagggtgatggggtatgaacctgtgtctcctttgtatccctctgttggtggggaaaggtgtctttctttctgccctccccccccaaaataattctgttcacttttgttttgtttccttgtgtactccagcattggttatagtcatgggaaaggaaggtgtccacggaggcacacttaacaagaaagcatatgaactcgctttatacctgaggaggtctgatgtgtaacgcagcctctccccatctacctagcaactgtcttcatcaacaaccctaattatggtcacaatgctaccaaactgtagatggtagctaatttttctttacctattttctaatgtcatgattcctgtttgcccaatggatcatttgtatgttaaccactgtatgtaaccaacccttatctggcaacataattgcagcacaataatgatttgcatgataccttgaaattggggggagggggcatgccaagttgggcatcactttgtcttagcaattaatgggatattgattactaaaataagttaatattaagcaaggtgccggttgtacaatctctgatcagtgtcttttcagcactttgagcatttacttggctcatttagtcttccttttgtagcgcatggttgggaggaaaaagtgcatgcatcattccttcactcttctctttttcccgcccccccctcccttcgcacataggcatttggtttgcttccatctttttttatgcagtgcctgtttttttttaaccaattaaaatcccttttgttgatgagctattgagagctgcagtagtttgcttttagtattgttgttgcacttgagcagagacaaacctttattcatagtgtctacaggacatatgaagagtgcaatggcaaaacaagagcaaaaagcacttcctcccatgaccttacagtaaccatactgattgaatccccagggacattccatcattgcaatagctcagatttttcttcctttttctttgcacaccagctctactctttagtaaaattgtaaaaggctgccattatggacattaggtatcccaacataaccatctggagtgtgtccagtttgttcttcataggaccaatttttatttgcagcttgagtttttatatgaagttgcattattgtggacttggctgtcttgtgatgaatttttttcatatgtattctgtgccatactattgttaaaatgaactgttgctattgtgagatggattttaactgacctattaagggtttctttcgaatggcactactttagggacattccagtatttgcttctattgtttgggccttgtggataatggacagatttaaaaacaaatcttgttggtgatttgtccatttctttccctgccctttgttacatttgggaaacagtttaactcatttgatttaatatgcatttaaaaaaatgccataactattaaaccccttgtttacagacagatgaaataaatttattccaacccaaaaaaaaaa

SEQ ID NO: 584 - DNA, 2107 bp, Homo sapiens
  CDS (124)..(1164)
gaaaagcacgaactccgagccatccgcctctcacgagaggactgtggctgtgactgccgagtgttctgtgatccagacacgtgcacctgcagcctggctggcattaagtgccaggtggatcgtatgtctttcccatgcggctgcactaaagaaggatgtagtaacacagcaggtagaattgaatttaatcctatccgtgttcggactcactttttgcacacaataatgaaacttgaactggagaaaaaccgagagcagcaaatccccacgctgaatggctgccacagtgagataagtgctcacagtagttctatgggccctgtcgctcactccgtagaatattcaatcgcagacagttttgagattgaaactgagccccaggctgcagtgctgcacctgcagtcggctgaagaattagattgccaaggagaggaggaggaagaagaggaggatgggagcagcttttgcagcggagtcacagattctagcacgcaaagcttggcacctagtgagtcagacgaggaggaggaggaagaagaagaggaagaggaggaggaggatgacgatgatgacaaaggagatggcttcgtggaaggtttgggcacccatgccgaagttgtccctcttccttcagttctttgttattctgatggcaccgccgttcacgaaagccatgcaaagaatgcttctttttatgccaactcttcaactctgtattaccaaatagatagccacattccaggaactccaaatcagatctctgagaactattctgaaagagacactgtcaaaaatggtaccctttcgctggtgccttacactatgaccccggagcaattcgttgactatgcccgacaagcagaagaggcctatggtgcctcccactacccagctgccaacccctctgtaatcgtttgctgctcctcttccgaaaatgatagcggtgtgccctgcaatagtttatatcctgaacacaggtccaatcaccctcaagtggaatttcactcatacttgaaaggcccctcccaagaagggtttgtctctgcattgaatggtgacagtcacatttcaaagcatcctgctgaaaattctttgagccttgcagaaaagagcatattgcatgaagagtgcatcaaatcacccgtggttgagacagtccctgtttagtagcttaaattattctaggaccaactcttctcttatttaaggcactgtatttaattggatttcctgggctcatcattgtttaaactgaagaccaagaaaacttggacggtggttaatcttccagactgtattttgttttttcctttctagccacatgactgtggcattgcacaaatacagtctctgtagggattttaaaagatttcagactgttttgatagaaaaagctaaattttaaaatgcatatctcacagttgcctacctgtcaaactgtgtgaaacctgccaatctgtgtagatcagagctccaaattttggattatcgggcctgtgcaagattgttaactaaggctgggaaataataagatttagagtcctaattttcaatatatctgaagataatgatgactttttaatgtaaaagtaattattgtaagaaaaagatttaattgttccatgtgtattttatttatggtagtttagaagacatgttttgatgaaaatgaacagcctcatgttcattcaagctgaagatgcatagctagttccacagagcatgcccacatggattgcatctggaatccattcacatttttatgatcatgactgatcagatttgcaaattcttaagggtgaaataggcctatttttgctattttggacaaataaatgattctatatgtgcaggtccttacacagttttctctaaagttaagagttaggacaatcctctggggagagtctagttcactgccctccctcagctgactccagagatggaggtagaaggaattgcctttcttttttaaacagcatcatcttgattcttagcttggacagcacctttaagctctaccccctacatcaaaatgtactttagtgccccttcacggtacctcgtgtggggtggggactgagaactctttgagatgaaaaaattt

SEQ ID NO: 585 - DNA, 3744 bp, Homo sapiens
  CDS (12)..(2573)
tgcggcataagatgaccctcatctcgcccatcatcctgaaaaagtacgggatccccttcagccggatcacgcaggaggccggggaattcatgatcacatttccctacggctaccacgccggcttcaatcacgggttcaactgcgcagaatctaccaacttcgccaccctgcggtggattgactacggcaaagtggccactcagtgcacgtgccggaaggacatggtcaagatctccatggacgtgttcgtgcgcatcctgcagcccgagcgctacgagctgtggaagcagggcaaggacctcacggtgctggaccacacgcggcccacggcgctcaccagccccgagctgagctcctggagtgcatcccgggcctcgctgaaggccaagctcctccgcaggtctcaccggaaacggagccagcccaagaagccgaagcccgaagaccccaagttccctggggagggtacggctggggcagcgctcctagaggaggctgggggcagcgtgaaggaggaggctgggccggaggttgaccccgaggaggaggaggaggagccgcagccactgccacacggccgggaggccgagggcgcagaagaggacgggaggggcaagctgcggccaaccaaggccaagagcgagcggaagaagaagagcttcggcctgctgcccccacagctgccgcccccgcctgctcacttcccctcagaggaggcgctgtggctgccatccccactggagcccccggtgctgggcccaggccctgcagccatggaggagagccccctgccggcaccccttaatgtcgtgccccctgaggtgcccagtgaggagctagaggccaagcctcggcccatcatccccatgctgtacgtggtgccgcggccgggcaaggcagccttcaaccaggagcacgtgtcctgccagcaggcctttgagcactttgcccagaagggtccgacctggaaggaaccagtttcccccatggagctgacggggccagaggacggtgcagccagcagtggggcaggtcgcatggagaccaaagcccgggccggagaggggcaggcaccgtccacattttccaaattgaagatggagatcaagaagagccggcgccatcccctgggccggccgcccacccggtccccactgtcggtggtgaagcaggaggcctcaagtgacgaggaggcatcccctttctccggggaggaagatgtgagtgacccggacgccttgaggccgctgctgtctctgcagtggaagaacagggcggccagcttccaggccgagaggaagttcaacgcagcggctgcgcgcacggagccctactgcgccatctgcacgctcttctacccctactgccaggccctacagactgagaaggaggcacccatagcctccctcggagagggctgcccggccacattaccctccaaaagccgtcagaagacccgaccgctcatccctgagatgtgcttcacctctggcggtgagaacacggagccgctgcctgccaactcctacatcggcgacgacgggaccagccccctgatcgcctgcggcaagtgctgcctgcaggtccatgccagttgctatggcatccgtcccgagctggtcaatgaaggctggacgtgttcccggtgcgcggcccacgcctggactgcggagtgctgcctgtgcaacctgcgaggaggtgcgctgcagatgaccaccgataggaggtggatccacgtgatctgtgccatcgcagtccccgaggcgcgcttcctgaacgtgattgagcgccaccctgtggacatcagcgccatccccgagcagcggtggaagctgaaatgcgtgtactgccggaagcggatgaagaaggtgtcaggtgcctgtatccagtgctcctacgagcactgctccacgtccttccacgtgacctgcgcccacgccgcaggcgtgctcatggagccggacgactggccctatgtggtctccatcacctgcctcaagcacaagtcggggggtcacgctgtccaactcctgagggccgtgtccctaggccaggtggtcatcaccaagaaccgcaacgggctgtactaccgctgtcgcgtcatcggtgccgcctcgcagacctgctacgaagtgaacttcgacgatggctcctacagcgacaacctgtaccctgagagcatcacgagtagggactgtgtccagctgggacccccttccgagggggagctggtggagctccggtggactgacggcaacctctacaaggccaagttcatctcctccgtcaccagccacatctaccaggtggagtttgaggacgggtcccagctgacggtgaagcgtggggacatcttcaccctggaggaggagctgcccaagagggtccgctctcggctgtcactgagcacgggggcaccgcaggagcccgccttctcgggggaggaggccaaggccgccaagcgcccgcgtgtgggcaccccgcttgccacggaggactccgggcggagccaggactacgtggccttcgtggagagcctcctgcaggtgcagggccggcccggagcccccttctaggacagctggccgctcaggcgaccctcagcccggcggggaggccatggcatgccccgggcgttcgcttgctgtgaattcctgtcctcgtgtccccgacccccgagaggccacctccaagccgcgggtgccccctagggcgacaggagccagcgggacgccgcacgcggccccagactcagggagcagggccaggcgggctcgggggccggccaggggagcaccccactcaactactcagaattttaaaccatgtaagctctcttcttctcgaaaaggtgctactgcaatgccctactgagcaacctttgagattgtcacttctgtacataaaccacctttgtgaggctctttctataaatacatattgtttaaaaaaaagcaagaaaaaaaggaaaacaaaggaaaatatccccaaagttgttttctagatttgtggctttaagaaaaacaaaacaaaacaaacacattgtttttctcagaaccaggattctctgagaggtcagagcatctcgctgtttttttgttgttgttttaaaatattatgatttggctacagaccaggcagggaaagagacccggtaattggagggtgagcctcgggggggaggggcaggacgccccggtttcggcacagcccggtcactcacggcctcgctctcgcctcaccccggctcctgggctttgatggtctggtgccagtgcctgtgcccactctgtgcctgctgggaggaggcccaggctctctggtggccgcccctgtgcacctggccaggggaagcccgggggtctggggcctccctccgtctgcgcccacctttgcagaataaactctctcctggggtttgtctatctttgtttctctcacccgagagaaacgcaggtgttccagaggcttccttgcagacaaagcacccctgcacctcccatggctcaggatgagggaggcccccaggcccttctggttggtagtgagtgtggacagcttcccagctcttcgggtacaaccctgagcaggtcgggggacacagggccgaggcaggccttcggggcccctttcgcctgcttccgggcagggacgaggcctggtgtcctcgctccacccacccacgctgctgtcacctgaggggaatctgcttcttaggagtgggttgagctgatagagaaaaaa

SEQ ID NO: 586 - DNA, 3258 bp, Homo sapiens
  CDS (66)..(2675)
tttcaactgggccacagaacaaaccagcccgcaaaacctctgcagcagacaatggcgagccgaacatgctgaaggagcacccagagaagggcgtgtacgtgaaggggctgtccatgcacacggtgcacagcgtggcccagtgtgagcacatcatggagactggctggaagaaccgttcggtcggctacacgctgatgaacaaggattcctcacgctcgcactccatcttcaccatcagcatcgagatgtctgccgtggatgagcggggcaaggaccacctccgggcgggcaagctgaacctggtggacctggcgggcagcgagcggcagtccaagaccggggccacgggcgagcggctcaaggaggccaccaagatcaacctgtcgctctcggcactgggcaatgtcatctcggcgctggtggacgggcgctgtaagcacgtcccctaccgtgactcgaagctgacgcggctgctgcaggactcactgggcggcaacaccaagacgctcatggtggcctgcctgtcgcctgcggacaacaactacgatgagacactcagcacgctgcgctacgccaaccgggccaagaacatcaggaacaagccgcgcatcaatgaggaccccaaggatgcgctgcttcgcgagtaccaggaggagatcaagaagctcaaggccatcctgacacagcagatgagccccagcagcctgtcagccctgctgtccaggcaggtgcccccagaccctgtgcaggtggaggagaagctgttgccccaacctgtgatccagcatgacgtggaggccgagaagcagctgatccgggaggagtatgaagagcgcctggcccggctgaaagccgactataaggccgagcaggagtctcgggccaggctggaggaagacatcactgccatgcgcaactcatatgacgtcaggctgtccacgctggaggagaacctgcggaaggagacagaggctgtcctgcaggtgggagtcctctacaaggctgaggtcatgtccagggctgagtttgccagcagcgctgagtacccgcctgcttttcagtatgagacagtggtgaaacccaaggtcttctccacgactgacactctgcccagtgacgatgtctccaagactcaggtttcctccaggtttgcggagctgcccaaggtggaaccctccaaatctgagatttctctgggctccagtgagtcatcctcgctcgaagaaacctctgtgtccgaggctttccctgggcctgaggagccctccaacgtggaggtctccatgcccactgaggagtccaggagcagatacttcctggatgagtgcctcgggcaggaggccgctgggcacctgctgggggaacagaactacctcccgcaagaggagccgcaggaggtgcccctgcaggggttactaggcctgcaggacccgtttgccgaggtggaagccaagctggccagactctcctccaccgtggccaggacagatgcaccccaggcagacgtccccaaggtccctgtgcaggtccctgcgccgacagacctgctggagcccagtgatgccaggcccgaagccgaggcggctgatgacttcccgcccaggcctgaggtagatctggcctcggaagtggccttagaggtggtgcggacagcagagcctggcgtgtggttggaggctcaggccccggtggccctggtggctcagcctgagcccctgccggccacagctggtgtgaagagggagagcgtgggcatggaggtggcagtgctgactgatgacccgctgcccgttgtggaccagcagcaggtgctggcccgtctgcagctgttggagcagcaggttgtgggtggagagcaggccaagaacaaggacctgaaggagaagcacaagcggcgcaagcgctacgcagacgagcgcaggaagcagctggtggctgccctgcagaactcggatgaggacagcggggactgggtgctgcttaacgtctacgactccatccaggaggaagtgcgggccaagagcaagctgctggagaagatgcagaggaagcttcgggcagcagaggtggagatcaaagatctgcagtccgagtttcagctggagaagatcgattacttggccaccatccgccggcaggagcgtgactccatgctcttgcagcagctcctggagcaggtgcagcccctgattcgcagggactgtaactacagcaacctggagaagattctgcgtgagtcctgctgggacgaagataacggcttctggaagatcccacatcccgtcatcacaaaaaccagcctcccagtagcagtttcaactgggccacagaacaaaccagcccgcaaaacctctgcagcagacaatggcgagccgaacatggaggacgaccgctacaggctcatgctcagtcggagcaacagtgaaaacattgccagcaactacttccgatctaagtgggccagccagatcctcagcacagacgccaggaagagcctcacacatcacaactcgccaccaggcctcagctgcccactcagcaacaactctgccatcccacccacccaggcccctgaaatgccccagccccggcccttccgcctcgagtccctcgacatccctttcaccaaggccaagcgtaagaaaagcaaaagcaactttggcagtgagcctctgtgagcacagctgcttgccattgcctgccttataggcatgtagagactgccaggccctcccagggcagccccaaccaggtctcctcccacctgccacacagcgctccggggcctgagggctccctcagccctgggaagacacattcccttccctgttccccagagagcccacctctgccctgggcaggagcccctcggaggctgtatagtcctccttagagaggcctgctccagctgttcataccacatcagtgtttccgtctgctcacctgccacagagcccacacccatgcccaccagtgttggtctttgcctcaaagcctgagacctgcttcacggccttcaccagccctgatggagagggcagcagctgccacgtggaggaagctcaatatcagctgggaaggaactgtgcctctgtctgactggccccacttcctaagcactgccctgccccatggggtggcacaggggtcccacagcaggtcttcctgcactgcccacccctggctggtctgtggcccaaggaaggccactccacattaagctgcccaataaactgcttttaagataaaaaaaaaaaa

SEQ ID NO: 587 - DNA, 1244 bp, Homo sapiens
  CDS (259)..(1170)
ccccccagcagggggtggtagcgtgacaactacgtaccttccgcctattttggtgacactatagaacaagtttgtacaaaaaagcaggctggtaccggtccggaatttccgggatatcgtcgacccacgcgtccgatggccctgagtgggactcggcccagaagccgagggactctctaggctgccgggcgctggtcgtcagcgccgaggctgggctgaggcgccgcggtaccatgaggcgccggtacttaagagattatggcatcagaaacccacaatgttaaaaaacggaacttttgtaataagattgaggatcatttcattgatcttcctagaaaaaagatctctaatttcactaataagaacatgaaggaggttaagaaatctccaaaacagttggctgcttacataaatagaacagttggacaaactgtgaaaagcccagataaacttcgtaaagtgatctatcgcagaaagaaagttcatcatccctttccaaatccttgttacagaaaaaaacagtcccctggaagtgggggctgtgacatggcaaataaagaaaatgaactggcttgtgcaggccacctgcctgaaaaattacaccatgatagtcgaacatatttggttaactccagtgattctggttcttcacagacagaaagcccatcatcaaaatatagtgggtttttttctgaggtttctcaggaccatgaaacaatggcccaagttttgttcagcaggaatatgagattgaatgtagctttaactttctggagaaagagaagtataagtgaacttgtagcttatttgttgaggatagaagatcttggcgttgtggtagattgccttcctgtgctcaccaattgtttacaggaagaaaaacaatatatctcacttggctgctgtgttgacttgttgcctctagtaaagtcactacttaaaagcaaatttgaagaatatgttatagttggtttaaactggcttcaagcagtcattaaaaggtggtggtcagaactatcatccaaaacagaaattataaatgatggaaatattcaaattttaaaacaacaattaagtggattatgggaacaggaaaaccatcttactttggttccaggatatactggtaatatagctaaggatgtagatgcttatttattacagttacattgagagatttcatctactaaagagcatttggtttttcaaaacatccctgaactgtataatttacaaaaaaaaaa

SEQ ID NO: 588 - DNA, 1845 bp, Homo sapiens
  CDS (91)..(1395)
ggagcagcaggagcccctgtgttggcagggttaattgaccatgatcagcaggtagctacaattagacaaggggcacgaaggacaccaaaaatgtgtcctctgggttccacacatatccttcctgcccctactgtggaacagcagccttacctacctgctgatcatggtcaattaaccctgccaacacaggggctcctgctgctccctagacataaggagtcaaaggtgctcagatccgaagccaacgacttagccttacgcctggctcggcagttcagaggccaccaggatgtgatcactcttgaccatgcttaccatggtcacctatcatccttaattgagattagcccatataagtttcagaaaggaaaagatgtcaaaaaagaatttgtacatgtggcaccaactccagatacttacagaggaaaatatagagaagaccatgcagactcagccagtgcttatgcagatgaagtgaagaaaatcattgaagatgctcataacagtggaaggaagattgctgcctttattgctgaatccatgcagagttgtggcggacaaataattcctccagcaggctacttccagaaagtggcagaatatgtacacggtgcagggggtgtgtttatagctgatgaagttcaagtgggctttggcagagttgggaaacatttctggagcttccagatgtatggtgaagactttgttccagacatcgtcacaatgggaaaaccgatgggcaacggccacccggtggcatgtgtggtaacaaccaaagaaattgcagaagccttcagcagctctgggatggaatattttaatacgtatggaggaaatccagtatcttgtgctgttggtttggctgtcctggatataattgaaaatgaagaccttcaaggaaatgccaagagagtagggaattatctcactgagttactgaaaaaacagaaggctaaacacactttgataggagatattaggggcattggcctttttattggaattgatttagtgaaggaccatctgaaaaggacccctgccacagctgaagctcagcacatcatctacaagatgaaagaaaaacgagtgcttctcagtgccgatggacctcatagaaatgtacttaaaataaaaccacctatgtgcttcactgaagaagatgcaaagttcatggtggaccaacttgataggattctaacagttttagaagaagctatgggaaccaaaaccgaaagtgtgacctctgagaatactccatgcaaaacaaagatgctgaaagaagcccacatagaactgcttagggacagcaccactgactccaaagaaaatcccagcagaaagagaaatggaatgtgcacggatacacattcactgctcagtaagaggctcaagacatgactgatttgcattttaaagcaagatgcgatgtccagagttacagagaatgagtagatgtgtctcatcggttaatagctctattatacctctaaaggtggaattgtcagtttagattcataaatgaaaaggtaaatgagtaatcagaataaaccaagtgataatcaaaccatgtcaagattattagttcagactctagcctgttaattttcttagttgatttctgaagctacctgatttattctattaaattgtaagcttgcaaactcaaaataaattggcagatttacctctcatgttttaatgtgtcaaattagagagcaaagtataacaggtgccttcacttttgagacttagtgccttaaaatatgtattctataatgatttcatatataaaagtatatttattgactgtaataaaataaaatatgatgtaaacaaaaaaaaaaa

SEQ ID NO: 589 - DNA, 3678 bp, Homo sapiens
  CDS (312)..(1478)
cccctcacggattacctcaatcataaactacatggtggtaatgggtgttgttttgtacctgggcaaaaaatttttgcagcccaaacataagactggtaactacaagaaggacttcttgtgtggacttggcatcactttgatcagctggttcactagccttgttaccgtttctcattatagcagtgttcatctctcttattggacagtctctctcatggtataaccacttctatgtctccgtttgtctgtatggaactgcaactgtagccaaaataatacttatacatactcttgcgaaaagattttattacatgaatgccagtgcccagtatctgggagaagtattttttgacatttcgctgtttgtccattgctgttttcttgttaccctcacttaccaaggactttgctcggcgtttattagtgctgtctgggtagcattcccattgctcacaaagctctgtgtgcataaggacttcaagcagcatggtgcccaaggaaaatttattgctttttaccttttggggatgtttattccttatctttatgcattgtacctcatctgggcagtatttgagatgtttacccctatcctcgggagaagtggttctgaaatcccacctgatgttgtgctggcatccattttggctggctgtacaatgattctctcgtcctattttattaacttcatctaccttgccaagagcacaaaaaaaaccatgctaactttaactttggtatgtgcaattacattcctccttgtttgcagtggaacattttttccatatagctccaatcctgctaatccgaagccaaagagagtgtttcttcagcatatgactagaacattccatgacttggaaggaaatgcagttaaacgggactctggaatatggatcaatgggtttgattatactggaatttctcacataacccctcacattcctgagatcaatgatagtatccgagctcactgtgaggagaatgcacctctttgtggttttccttggtatcttccagtgcactttctgatcaggaaaaactggtatcttcctgccccagaagtttctccaagaaatcctcctcatttccgactcatatccaaagaacagacaccttgggattctataaaattgacttttgaagcaacaggaccaagccatatgtccttctatgttcgagcccacaaagggtcaacactttctcagtggtctcttggcaatggcaccccagtcacaagtaaaggaggagactactttgtcttttactcccatggactccaggcctctgcatggcagttctggatagaagtgcaggtttcagaagaacatcctgaaggaatggtcaccgtggccattgctgcccactatctgtctggggaagacaagagatcccctcaactggatgctctgaaggaaaagttcccagattggacatttccctctgcctgggtgtgcacctacgatctctttgtattttaatcttgtggatgagctctaagtacatgcccagtggatactccatgtgacatggtttctccctatgttacgtggatgtttgtaacgtaagtcaatgaattttaatgatcatatgttcaaagagctttctgggttaacgcttttcagggccaagcactataagggtttagctgtggcgcagtgatgcatggcctgttgacacttgaaaatgccagtcttttggcacttcagcacatgtgggtactgccactacacacacgtcattttatatgaccttaaggacaaagccaacaatccacttcaatagctgcccctttaggatcaagaaagatgtacactgtcagagcattgttaatgagacaaaagttgtttccaatttaagccccaaaaccatttgttgtattagtggatggtgggtaaaatatcattcactgaggtaatgattccccttgagaatataactctgtgtaggtcactggaaagtgattgccatagggctgggagagaagcattgcactcttgaggctgtagcctgtgtcaagctgtttcttcaggcagcctctcaaatgtgctttgtctctctgtgctgaggcctggaccctgtgctgagctggtgactcactgtcctgacaagtggacacacagatgcactgctgtgctgctttcctgaggtggttttctatgcctgttttcctctgaaacatgtctgttacccctctccatcttaccaagttgaaaaggggaatatttggccacatacccctctggttttcgtaggttcttttggttcagaatattgtttgtgccagtacatgaccttaacttccttcctcagagcactgagctgccatctgggctattctggggtagaaggaaggctgggagtggtgggaattttataaatatttattctcttttctttgtttcataggagtcttgtgttatacaaggttagtccttcatggtataatcttactgatgcactgggcctatctttttgttttccagccagttgaatagattagtttttctcagtaacttactatccagcagactggctttcctgagacttgaggttgtggcttatactggaatgagaccactgtacgtgtaggtggttcagatcctgcgtaatggcagcatgaggacttaaaaggtggttttcattttgaagatggctatgtagcttgtaaggtgtatcacagcagtacctctcatggctttttggttccagcagtgagggcattggtgagatcaatggtaaactgtgcaagctttctttttatcattaggaaatgtgaaacgttggacaaattttgagttttaacaaggacaaaaagttgaaagaaaaggcacagttaacaaaaaagggtggctagatttatcttgggtgatggaggaaatgagagaggaatgctcttgaaaggtggtctgtggatctgtctgaatagaaagagcacagtaagtatgcattgccggagaaaacgtccttgaagctgcttgtctcatgtgtatgatgtgctttttaaatcatgcccctcgttgcctgcctaatctgtgactccctaaaaactaactgggcccatgtagatggggctgcaaccagagctgaataacatgttaggctcacacatgcatcagcactgcacactggaatcattgctcttcctggactttgtagaaatcagtctcaagtgcttcaagagtctggctcctgctacttttatctgtcaggtagcacataaggtttgcagggtttatattttgtatagaatcacagttgtggagaaaaagtaataatttctcaatgaattttaaaaatgggcctattttctatccccgtggttcatctgatataattagtgttccctgtgaattccccccctctatgggaaggatgcctttactctttatcagtaataaattatgactgttttcatattgccttagggttatttccctgtgtaaaccattgtcttttgttttggttttctttagcattatgaagctttggtattgtacaaggtcagtagtaagatgctcactagtctcagggcttgtgtaatattctgggaggtcatttaaatgccagaaatggtcaagcaattatacacagtatttatgactctgttaagcataccgtttgtctgtcacattagtagattctgagattaaaaaaaatttttaaaaaaaaaaaaaa

SEQ ID NO: 590 - DNA, 1694 bp, Homo sapiens
  CDS (349)..(1467)
cgctccggcagcgcgctctgcccggcttcctcagtctcctcgccgggagcgtccgggagcagctccgaggccgcggcgaaaccagggagcagggattggatcaagtcattgcatctagagtacgggggaacgaagaaatcatggagagagtttgccccaggagagaggcgagcgttatgtaacctaggatctggggtgggtaacagtctgtgcagtgtcaatctgagaggagaaaacacccaacgtgagggaatggtcagccttgtcatttcagcattctggccttccctatgaggaggaagatcaacgaagtcacagggcccttctagcccaatccagagctgtaccatggcagagacaagagaagaggagacagtgtcagcagaagcctcagggttctcagacttgagtgactcagagttcctggagtttctggacctagaagatgcccaagagtcaaaggctttagttaacatgcctggcccatcttctgaatcccttgggaaggatgacaaacccataagcttacaaaactggaaaagaggattggatatattatcacccatggagagattccaccttaaatatttatatgtcactgacctggctactcagaactggtgtgaactgcaaacagcatatgggaaggagcttcctggtttcttggcacctgagaaggcagctgtgttggacactggtgccagcatacacctagctagagaactagaacttcatgatcttgtgactgtcccagtcaccactaaagaagatgcttgggcaattaagtttctgaacatacttttgctgattcctaccctgcagtcagaagggcacatcagagagtttccagtgtttggggaagtggagggtgtacttcttgttggagtgattgatgagctgcactatacagccaagggggaactggagctggcggaactcaagacacgcaggcgccctatgctccctctggaagctcagaagaagaaagactgttttcaagtcagcctatacaaatatatctttgatgccatggtacaaggaaaagtgacccctgctagcctaatccaccacacaaagttgtgtctagaaaagccactggggccatcagtgctgaggcatgcccagcagggaggcttctctgtgaagtctttgggtgacctcatggaacttgtcttcttgtctctaacactgtcagacctcccagttattgatatcttgaagattgagtatatccaccaagagactgccactgtgctgggtactgagattgtagccttcaaagagaaggaggtgagagccaaggtgcagcattatatggcctactggatgggccaccgagagccccagggagttgacgtggaggaggcttggaagtgccggacgtgtacctatgcagacatttgtgagtggagaaagggcagtggagtgctcagctctacactggcgccccaagtcaaaaaagccaaatgaatagaaggtatgctttcaagaatgttgatccttcctgctcctgttgtacctaagcaaaagaggaccagtctctgagcttggcttttatggagagtgttcttattttggctcttttttttatttccacaacctctaaccacattcagtccaggaccaaggctcagggatgagtgggagagatgggttatactgtccctggagcttcatcatgattgcctgagaag

SEQ ID NO: 591 - DNA, 7847 bp, Homo sapiens
  CDS (382)..(3159)
  misc_feature (1)...(7847): n = a,t,c or g
atgcagggtgactgtctgaggcctgagagtggggcccatgtgcaagcccaagaaagtggctggtgtgagaatgagggtgttcagactattgaagggtgtttggatgaaagaggcaggcgcggcgcggcgcggagcgagcgggcgcagcgcggagctcgggcccatggtgcgcccgtgtccgtcggtcgggccgcgcgggcgctccgcgcgtggcccggcgctcgcgagctcgccccctcgctgcgggcccggcccgcccgctgccgccgcctcctcccccggggcggcgcggcgccggcgggcggcggcgcggaggccggaccgggcggcggcccaggcggcgcggggggcgcggcggccaaggcgggcggcgccgccgacatgacggacaacatcccgctgcagccggtgcgccagaagaagcggatggacagcaggccccgcgccgggtgctgcgagtggctgagatgctgcggtggaggggaggccaggccccgcactgtctggctggggcaccccgagaagagagaccagaggtatcctcggaatgtcatcaacaatcagaagtacaatttcttcacctttcttcctggggtgctgttcaaccagttcaaatactttttcaacctctatttcttacttcttgcctgctctcagtttgttcccgaaatgagacttggtgcactctatacctactgggttcccctgggcttcgtgctggccgtcactgtcatccgtgaggcggtggaggagatccgatgctacgtgcgggacaaggaagtcaactcccaggtctacagccggctcacagcacgaggtactgttgtgggtgttgttctttacactggcagagaactccggagtgtcatgaatacctcaaatccccgaagtaagatcggcctgttcgacttggaagtgaactgcctcaccaagatcctctttggtgccctggtggtggtctcgctggtcatggttgcccttcagcactttgcaggccgttggtacctgcagatcatccgcttcctcctcttgttttccaacatcatccccattagtttgcgcgtgaacctggacatgggcaagatcgtgtacagctgggtgattcgaagggactcaaaaatccccgggaccgtggttcgctccagcacgattcctgagcagctgggcaggatttcgtacttactcacagacaagacaggcactcttacccagaacgagatgattttcaaacggctccatctcggaacagtagcctacggcctcgactcaatggacgaagtacaaagccacattttcagcatttacacccagcaatcccaggacccaccggctcagaagggcccaacgctcaccactaaggtccggcggaccatgagcagccgcgtgcacgaagccgtgaaggccatcgcgctctgccacaacgtgactcccgtgtatgagtccaacggtgtgactgatcaggctgaggccgagaagcagtacgaagactcctgccgcgtataccaggcatccagccccgatgaggtggccctggtacagtggacggaaagtgtgggcttaaccctggtgggccgagaccagtcttccatgcagctgaggacccctggcgaccagatcctgaacttcaccatcctacagatcttccctttcacctatgaaagcaaacgtatgggcatcatcgtgcgggatgaatcaactggagaaattacgttttacatgaagggagcagatgtggtcatggctggcattgtgcagtacaatgactggttggaggaagagtgtggcaacatggcccgagaagggctgcgggtgctcgtggtggcaaagaagtctcttgcagaggagcagtatcaggactttgaagcccgctacgtccaggccaagctgagtgtgcacgaccgctccctcaaagtggccacggtgatcgagagcctggagatggagatggaactgctgtgcctgacgggcgtggaggaccagctgcaggcagatgtgcggcccacgctggagaccctgaggaatgctggcatcaaggtttggatgctgacaggggacaagctggagacagctacgtgcacagcgaagaatgcacatctggtgaccagaaaccaagacatccacgtttttcggctggtgaccaaccgcggggaggctcacctcgagctgaacgccttccgcaggaagcatgattgtgccctggtcatctcgggagactccctggaggtttgcctcaagtactatgagtacgagttcatggagctggcctgccagtgcccggccgtagtctgctgccgatgtgcccccacccagaaggcccagatcgtgcgcctgcttcaggagcgcacgggcaagctcacctgtgcagtaggggacggaggcaatgacgtcagcatgattcaggaatctgactgcggcgtgggagtggaaggaaaggaaggaaaacaggcttcgttggctgcagacttctccatcactcaatttaagcatcttggccggttgcttatggtgcatggccggaacagctacaagcggtcagccgccctcagccagttcgtgattcacaggagcctctgtatcagcaccatgcaggctgtcttttcctccgtgttttactttgcctccgtccctctctatcaaggattcctcatcattgggtactccacaatttacaccatgtttcctgtgttttctctggtcctggacaaagatgtcaaatcggaagttgccatgctgtatcctgagctctacaaggatcttctcaagggacggccgttgtcctacaagacattcttaatatgggttttgattagcatctatcaagggagcaccatcatgtacggggcgctgctgctgtttgagtcggagttcgtgcacatcgtggccatctccttcacctcgctgatcctcaccgagctgctcatggtggcgctgaccatccagacctggcactggctcatgacagtggcggagctgctcagcctggcctgctacatcgcctccctggtgttcttacacgagttcatcgatgtgtacttcatcgccaccttgtcattcttgtggaaagtctccgtcatcactctggtcagctgcctccccctctatgtcctcaagtacctgcgaagacggttctctccccccagctactcaaagctcacatcataggccgtgcgttcgctggagggggccctggtcttggcgcttccctgatggacagagctcaagttccatttatattaaccgccacctgtggattttgcagtaattgctaacacatgcagttttaatgggaagcggctctgcgcctaaacggagtcctaacgctgcatcaacgggagggagggtcctgaaagagacccatctgggcctgtctgaacccctcgttcttcatgtttaggtgaatatgaatatgttaaagctggtggctcagctgggagatttatatgggtcactgtgcgagcttccttatgacttgaattttgttgtcacatgataaaagtttctgtgtagctgaaggttgtagaaggcttgtttgtgtgtntgtgtgtgtgtgtgtgtntgtgtgtgtttttaaagagtcctaatgtgtatgtactctttatgtctttcttgctcttacaaagaggtgtcagaaaaatagaaagctcttggtgtcggtttgggaggaaaagacagtgacatttggtaaaaagttatccacacaataatctccattcggaaatgctcagtatcgtctccagccagccctgcttatccaggttacactggattcctgggatcgtaaccagtaaatgagaggagagggagagagagtgtcctaagtccaatctgttatccttgatctgattcagcatccatagtgtgtgagttaacttcacctgccacctcgtaaaagaatttcagaggtgtgatcccgctttattgggacctggtaacaatcacaaagccagtggctgtttgagaaggacctcagacattttcagcagagttgttttagcaggaaacgtgccactgaatggcccctaaatgtgtcgacagtgtgataagagactcaactaattctttaggcaacatggcagatgtgactcagatcctccaagaccaaagcggaaaggtcagggggctgggactcttctcttccatagaagcctgtttcctgttaggaggcataatggaagatgaccccacaaaggcagaggcatctttcggaacaacactggtggcagctttcagaacaaggaacccctggtgggaggacgcccaagctacagcgttgggatctgggatctgttccactgccggcagatttcaaggggaacttgctgaaaggcagccagtggtgaagatttctcccctcccaggatggactacatgccggcatgtttcttataaagctgtggctgcttgtttcagaggaagggagtttgcagtcgcgggacgtggtagagcaaggcattcttgggttttcaagttgcttcttgcagaagccacatatgcatgccataagggttaagttggtggatctttaagagccaagtgtggttgagatcttggatttgcgtttacttcttgatgaatacatatccttcaaaccctctgcctggcgctacttctgtgtgcttcagagaggtacatcacagcctggtttctgatgcctactaactcctgctcttggagagctggagacacgaggatcagatagtcccttgcctttggagcactcttgataagcttttgtattttgtgttgtccttttaaaatgttctagaatgactttacgttgcaggtactggttaattggctgttgacaccacatctattttgtcttatgattctgcagttttgcagtacttttctctatctgattcagccatttctgccagagggaaaaggtcggcagaaaagatgtattgagtgaatagttaaggataggatctttgtccaaaaatttcagaaagattgagcaaatctgacgtattcattgagtgagtttctgtgttttcaaaggtggaggagaaatttgtgctggaagtttttaagcctccgttttcttggaaatcagtctgtaacactggcaagtcttaagatagtcccgtttagactttgcagatgctgaacctggctctgtaacgctgggaagtcttaagatagtcctgtttagactttgcaaaccctgtacctggctttgctcggagattcgggatgctggctcctgcaggcagggcgtgtgggagcctcgtcagaaagttttagaggtttccagcagaagcagaatgaagatggtctccctggccttttccttaattctcaattttgattgaggtgcacaagttgacttttaaagccaacgcttaagatactgattgacatcttcaagggagaatgctcccaggaggggctgaagaagccatagttggaagtggaaggtactcgtcagtgttctccacaaacctttttactctgttgtctcagccgcactggggcggaggcggtcaagggtgagaagtaccgacactcaagtgcaaactgccacgtcgttggcccatcccatcagtgggcagctggctgacgccattcactggacggtccctgaacacctaggaatgcacacaccgtgcttctcagacactggagacgcaaaggcaggaggatgcagtccggtgagaggacacgatctttacctgcacaatcagactgtaagcccagcagagaaccccaggggcgcctgggtacttctcggaggtcatcttagttgtggtggggaagacaaagaaataagcaaacaagaaactagagttactatacaagaaactctcctgagtttgtaaaccttaagcataaggattcagttgacctttttcttggttcatcaatctggaaagaacttacataaagcgccattgacactgtcacctgggagctccatgggccgtaagtctttgacagccaatttaatttgaggtcagagggccttgaggtacacagtcagcactgtttgaacacttttcctgaaagcaaaactcacagctccctgcgccctctgacaacactagctatttctgccagagtaagaacttctattactattttattattgttcatatgtcttttgatgatggttgtgtgacagggggaagcaggatctatttggtttcttccccctccccccaccccttcctttttgtctctctttttttttctctaagaaaatcaccagactagtttttccatcttgagtaatttcttatgtgggacagttttgatcctcattttgaaagcatgcgtgcgcacatgtgtgttgcctgtggtgccaggtgagacaggtggcactaactccagctgcttggaaggcatcccaagggcgcatcttaaagttggagcagacctcccttttccagcccctggggccattagaccacgtgctggaactagcattgtaaaattcccatcccagttccactcccctgaagtgaaacccttttttttttgtgacagtaaatcttaaaaatcattgtctctttatgaacatttcctcagtttcttctctgctgaaaatgtaagccatgctactttttaatgtattttgaattttgtgctcattggaaattgatatgctaatgcctcccccaccccccgccagacttttctttttatactttgtcttgtttttactggggtaggctgggcatgcgtgcgtgcctttagggcagcattttaaacctttgccaaaattgcaaatgggacatgtacattcttctgctccatcctacttaaacacctatcagctatttttatctttaaccttttctgtatgtttgaagtgtgtggggggtgtgtgtgtgtgtgaaagagcgagagaatgatgtcatctaaagttttttgaagaattatttggttttcattgcattaaaattctatcactcccagctttgttttcatttaaaaaaatatacaaagagctttgtaaatacaacacattttatttctcccccttcttttaatgtacagcttttttgccacttatatatacttaaaatattcccatgaattatgtccagttcttcttggaaaaaaatttggttttgaatgaacctgcaaagcatcctgcagcgtgagcagctcctccacctggagctccgaagcatcttctcaggccaaagcggcattacccgtgaatctgtcttctccgccacagcatggtttgaggcgcagtctgttaatatagctgggccatgtcagtgactgttgtgtttgtggggtcaggtggggggcatggtatttgcaaaaaaaacaaattatggctaatttattattttgttgcagtggggttaactgtaaactcatgtaagagtctgtgatttcctcattggttgatctctctctctgtaatcctcattgcaaattttcaccaggacagcgttttttgattagaggggagctctggcacagtatgctttaatttagcaggaacttccagatgatttaaattctcgatgctgtgatgacacacatatgatctttcgtgtttctgagcgactctactttcattgtttgccagcgtggctcgttgctgttgcccaataaagcttgtgtacgttctgccttgggggattattttaatttgtacagaaacatgaattctggtatcaaaatgaggactttttattataacgctcctattttttctttatttcatggtacatgaaatgtaaagaaaactctttccagttcagaaaattattttgattttggcaaaaaaaaccccaaatcaatgcatgttatttattattttgtactattgtccatcccagacgtgtcagaatttcaaaaggtgatagatataaatggaa

SEQ ID NO: 592 - DNA, 2096 bp, Homo sapiens
  CDS (110)..(1630)
aagctccaatatgaaaaacagatggaggaaagacagagaaagctgaaggagcgaaaagagaaagaagaacaacggagaatagctgcagaagaaaaaagacaccagaaggatgaagcacaaaaggaaaaatttacagccattctttatcgtactttggaacggaggagacttgctgatgattatcagcaaaaaaagatggtcatggggaggctctgcaatggcgaattctgagagcaaaactgccaataaacgatctgcatctactgaaaaacttgaacagggtacttctgctttaatcagacaaatgcctttgtcatctgcaggccttcaaaattccgttgccaaaaggaaaacagacaaggagagaagctcatctttaaatagaagagatagtaacctacattcgtctactgataaagaacaagccgaaaggaagccacgtgttacaggcgtcaccaattatgtaatgcagtatgtcactgtacccttgcgtaaatgtactagcgacgaattgagggctgttatgtttcccatgtcgacaatgaaaatacctcctcaaacaaaagtagaagagtctcccttggagaaagtagagacacctcccaaggcaagtgtggatgcacccccccaggtgaatgtggaagtattctgcaacacaagcatggaagcgtcccccaaggcaggtgtgggcatggcccctgaggtgagcacggactcattccctgtggtgagcgtggacgtgtcgcctgtggtgagcacatatgattctgagatgagcatggacgcatcccccgagttgagcatagaagcactcccgaaggtggacctggaaacagttcccaaggtgagcatagtagcatccccggaggcgagcctggaagcacccccggaagtgagtctggaagcactgccagaggtgagcgtggaagcagccccagaggggagcctggaagcacctcccaaggggagcgcagaagtagcccccaaggagagtgtgaaagggtcacccaaggagagcatggaggcatctcctgaggcgatggtgaaagcatcccccaagacatcccttgaagcaagcatggaagcatctcccaaggcaaaagcgagagacgctccaaagaaatcagaaatggacaaacaggccttaatccctattgccaagaagcgtctatcatcatacactgagtgttataaatggtcatcatctcctgaaaatgcttgtggtctgccgtctcccatcagcactaacaggcaaatccaaaagaactgccctccatcaccattaccacttatttcaaaacagtcaccacagacttcttttccttataaaataatgcctattcaacacaccctgtctgtgcaaagtgcatcaagtactgtcaaaaagaaaaaagaaacagtttctaaaaccactaacagatgtgaggctttgagccaaaggcatatgatctatgaagagtctggtaataagagtactgcaggtattatgaatgccgaggcggcaacaaaaattttgacagaattgcgccgccttgctgatgatggcggacggcgccgcagctggcgctggcggcagcccatccttgagagagctgcgggcacggatggttgctgcagcaaacgagattgctaaggaaaggaggaagcaagatgtggttaatcgtgttgcaacccattcctcaaatataagatcgacatttaaaccagtaatcgatggatccatgcttaaaaatgacataaaacaaagattagcaagagagcgcagagaggagaaaaggagacagcaagacgccaataaagaaacacaactacttgaaaaagaaaaaaagaccaagctccaatatgaaaaacagatggaggaaagacagagaaagctgaaggagcgaaaagagaaagaagaacaacggagaatagctgcagaagaaaaaagacaccagaaggatgaagcacaaaaggaaaaatttacagccattctttatcgtactttggaacggaggagacttgctgatgatatcaaccaaaaagatggtcctggggaggcttctgcatggcgaattttgagagcaaaactgccaattaacaactgctctaccgaa

SEQ ID NO: 593 - DNA, 1248 bp, Homo sapiens
  CDS (105)..(866)
tcgaaggactgtatcttttgtacactggttaaccaattgatgcccttcgacattttaataaagctcggaaagatcgtgactggggccacaatgccctttataatatgatagagatctgtttgaatccagataatgaaactgttggaggtgaagtatttgaaaacctggatggagacctgggtaattcaactgagaagcaagaatctgtgcaactggcagtaagaacagcagaaaaacttcttaaggaactaaaacctcagactgttcagggtcacgtacagcttcgcataatggaaaactattgcttaatggctaccaaacagaaatctaatgttgaacaagcattaaataccttcactgaaatagcagcatctgagaaggagcatatcccagcgctcttgggaatggcaacggcttatatgatcttgaaacagactccacgagccagaaaccagctgaagcgtattgcgaaaatgaattggaatgctattgatgctgaagagtttgagaagagttggctgctacttgctgatatttacattcaatcagcaaaatatgacatggcagaagacctgttaaaacggtgcctgcgtcataatagatcttgctgcaaagcttatgaatatatgggatacattatggaaaaagagcaagcatatacagatgctgccttgaactatgagatggcatggaaatatagcaatcggacaaatccggcagtaggatacaaactggcatttaattacttaaaagcaaaaagatatgtggattcaattgacatatgtcaccaggttcttgaagcacatccaacttatccaaaaatcagaaaggatatacttgataaggcccgtgcgtctttaagaccttgaaaataattttaacttaggtgttggtttaacaggaaatgaaagaaatctaactttcagttcttcctgttcaaaacaggtttgagctcagtgctttgttattagaagtatacccttttttctccagcagaggttgctgctgtacatcaagagaagtactatgtgaaattggtgtttcctaatggagttgaatgagagctggtctatttgactctgttttgattgggtacagatttggtgactctgtggtaaagactataattatttctataaagaatattttgttaaaatctaggtaattaaataccctgtatcttttctaaggaatattatttcaggaaatatatttaaaatgcattgttctcttttaaaaaaaaaaaaa

SEQ ID NO: 594 - DNA, 1625 bp, Homo sapiens
  CDS (390)..(1421)
aaggatccttaattaaattaatcccccccccccggccagatgggggcgtctcccggccttgttgactttggcgtccgcggggagctgcccctgtgcccgtggctctctgcgcatgcccggaccccggcggctccggagtccgggaggctctggctgctccagtcgcgggtccgggccccgcctctccactcggcggtggcgtccgtgttgttattgtggtggtagcggcgtctggctgctgcggaccccgccgagtcctagcgcctggcctgcgcgccgctgcccgcgccacaggattaatttatttttggaaatcaagtgcaatattggaagccatttctactaattttatttcacttttaaatttatgatttgatttgaatactatcatgggaggagctgtgagtgctggggaagataatgatgacttaattgataatttaaaagaagctcagtatattcgtactgaaagagtggagcaagccttcagagcgattgatcgtggagattactatttggaaggctacagagacaatgcttacaaagacttagcctggaagcatggaaacatccacttgtcagcaccttgcatttattctgaagttatggaagcattgaaacttcaaccaggattgtcttttcttaacctgggaagtggaaccggatatttaagtacaatggtgggcttaattttaggtccttttggaataaatcatgggattgagcttcattcagatgtggtggaatatgccaaggaaaaactggagagcttcatcaaaaatagtgatagctttcataaatttgagttctgtgaacctgcatttgttgttggtaattgcctccagatagcttctgacagtcatcagtatgatcgaatttattgtggagctggagtacagaaagaccatgaaaactacatgaaaatattactaaaagttggaggcatattagtcatgcctatagaggatcagttaacacagattatgcgaactggacagaacacttgggaaagtaaaaatatccttgctgtttcatttgctccacttgtgcaaccaagtaagaatgataatggcaaaccagattctgtgggactccctccctgtgctgtcaggaatctacaggacttggctcgtatttacattcgacgcacacttagaaatttcataaatgatgagatgcaggccaaggggattcctcaaagggctccacccaaaaggaaaagaaagagagttaaacagagaattaacacttacgtatttgtgggtaatcagcttattcctcagcctctagacagtgaagaggatgaaaaaatggaagaggatatcaaagaagaggaggaaaaagatcacaatgaagcaatggaagcagaaggagccacctcaaaatttactgggagaaacaatcatgaaggctgccctccctgaatctttaacagcctacttgacatatttacaagacagtaacttagataaggagaaaatggctatggaatatcctaatcctgaaatgtgcattggtgcggttcagcaaaatatcttcctcaagcatttctgggaacactgcttgcgcgcacacccaggtttctcgggaccctgcttgctaccagagagagttcccgactgccg

SEQ ID NO: 595 - DNA, 1444 bp, Homo sapiens
  CDS (200)..(1297)
tttcgtgccgctgaggtcggaacgtctgcgtgtgtgcgggctggttttgtggcggctgctgctagagctggagcatttgccgggttggtggctcctgcacatttttacagttctccagtccttctctttcgtcagtataaaagattaaactctacagaagaatgcaatcaagtgatggcttttcctttagaatttgaatatggaggctacaggaacagatgaagttgacaagctaaaaaccaaatttatatctgcttggaacaacatgaaatatagttgggtgttgaaaacaaagacgtattttagtagaaattctcctgtattattgcttggaaaatgttaccattttaaatatgaagatgaagataaaacgttacctgcagagtcgggatgtacaatagaggatcacgtaattgcaggaaatgtagaagaatttcgtaaagatttcatttctagaatatggctgacctacagggaagaattccctcaaatagaaggctcagctttgacaacagactgtgggtggggctgcacattgagaactggccagatgctcttggctcaaggactcatactacactttcttggtagagcttggacctggcctgatgctttgaatattgaaaattcagactctgaatcatggacttcccacactgtcaaaaaatttactgcatcatttgaagcatcactttcaggggaaagagaattcaaaaccccaacaatttctctgaaggaaacaattgggaaatattctgatgatcatgaaatgcgaaatgaagtttatcataggaaaatcatctcttggtttggtgattcccccttggctctttttggcttacatcaactaatagaatatggaaagaagtctgggaaaaaagcaggagattggtatggaccagctgtggttgctcacattttaagaaaagcagttgaagaagcaaggcatcctgatttacaaggaataactatttatgttgcacaagattgtacagtttacaattctgatgtaattgataaacagagtgcttccatgacttctgataatgcagatgacaaagctgttattattctagttcctgttagacttggtggagaaagaaccaacaccgactacttagaatttgtgaagggtattttaagcctggaatattgtgtgggtattattggtggcaaacctaaacagtcatattactttgctggatttcaagatgacagtttgatttacatggatcctcattactgccaatcttttgtagatgtcagcataaaggatttccctcttgaggtcattttgtgatccagtattttaattcagaaaaatttgagaatacataaatgaaacatgtaattattacatggttttgattgttttcccagttggtgcttttacagactaaagtaattttacagaataaaataacttaaatcaaaaaaaaaaaaa

SEQ ID NO: 596 - DNA, 1895 bp, Homo sapiens
  CDS (128)..(1633)
tattgatgcatataaaagtctagggcaggcatatagagaactgggcaattttgaagcagccactgagagctttcaaaaggcactgttgctcaaccaaaatcatgtgcaaaccctccagctccggggaatgatgctctaccaccacggcagcttacaggaagcccttaagaactttaagcggtgtctgcagctagagccatataatgaagtgtgccagtatatgaaagggctcagccatgttgccatgggacagttttatgaagggataaaagcacaaacaaaagttatgctgaatgatcctctcccaggccagaaggctagccctgagtatcttaaagtaaagtatctccgagagtattctcgatatcttcatgcacaccttgataccccccttacggaatataacattgatgtggatctgcctggaagctttaaggaccactgggctaaaaatttgcctttcctcatagaagactacgaagagcagccagggttgcaaccccacataaaagatgtgttacatcagaattttgagagttataagcctgaagtacaggagctgatttgtgtggctgatcgtttgggatccctgatgcaatatgaaacacctggtttcctgccaaacaagagaatacacagagctatgggtttggccgcattggaggtcatgcaagccgtgcagcgtacatggaccaactcgaaagttcgaatgaatgggaagacacggttgatgcagtggagagacatgtttgacattgcagttaaatggagaaggattgctgacccagaccagcccgtgctgtggttagatcaaatgccagcacgaagtcttagcagaggttttaacaaccacattaatttaatcaggggtcaggtgatcaacatgagatacctagaatattttgagaaaatacttcattttattaaagacagaattcttgtttatcatggagctaataatcctaaaggattgctggaagttcgggaagccctggaaaaggtacacaaagtagaagaccttcttccgattatgaagcagtttaatactaaaacgaaggatgggttcaccgtgaacacaaaagttcccagccttaaagaccaagggaaggaatatgatggattcacaatcacgattacaggagacaaagttggcaatatattattttctgtggaaactcaaaccacggaagaaaggacacaattatatcatgctgaaatagatgcactttataaagatttgacagcaaaaggaaaagtattgattctttcatcagaatttggggaggctgatgctgtctgcaacttaatcttatccttagtttattacttttataatttaatgccactctctcgaggatccagtgtaattgcttactcggtcatcgtgggagcactgatggcaagtggaaaagaagtagcaggaaaaattcccaaagggaagttagtcgactttgaagctatgacagcccctggttcagaggcctttagcaaagtcgccaaaagctggatgaacttgaaaagtatttcaccttcttataagactcttccatcagtttcagaaacgtttccaacgttaagatcgatgattgaggtgctaaacacagactcttctccacgttgtcttaagaaactctagttctgctgctgtatttatacaagtaaagggccggacctcttgcttcttaagttattttttaaaacatggaattataaagaaattaggtcctctattacttttgataccaatttttataggaattgaatacttgaaatcattttctttacttttctgaaccataatgaaaatcatgaaagaggctttcggggggaaaaagctacttgacttggagggaagcgtatgtattacccgcagcctgttggttccacttataagg

SEQ ID NO: 597 - DNA, 1934 bp, Homo sapiens
  CDS (172)..(1155)
gcagcccccggtcgcgacggctctcctcggggctcgggggcgctgggcggcggccctgggctgctttggctaacttggctgcggggcaggcgcgaggagcggcgcgccgaccgggccgagcggagaggccgcccattggccggccagcgccacaaaggtggggcccgaaccatgagctcctacctggagtacgtgtcatgcagcagcagcggcggggtcggcggcgacgtgctcagcttggcacccaagttctgccgctccgacgcccggcccgtggctctgcagcccgccttccctctgggcaacggcgacggcgccttcgtcagctgtctgcccctggccgccgcccgaccctcgccttcgcccccggccgcccccgcgcggccgtccgtaccgcctccggccgcgccccagtacgcgcagtgcaccctggagggggcctacgaacctggtgccgcacctgccgcggcagctgggggcgcggactacggcttcctggggtccgggccggcgtacgacttcccgggcgtgctggggcgggcggccgacgacggcgggtctcacgtccactacgccacctcggccgtcttctcgggcggcggctctttcctcctcagcggccaggtggattacgcggccttcggcgaacccggcccttttccggcttgtctcaaagcgtcagccgacggccaccctggtgctttccagaccgcatccccggccccaggcacctaccccaagtccgtctctcccgcctccggcctccctgccgccttcagcacgttcgagtggatgaaagtgaagaggaatgcctctaagaaaggcaaactcgccgagtatggggccgctagcccctccagcgcgatccgcacgaatttcagcaccaagcaactgacagaactggaaaaagagtttcatttcaataagtacttaactcgagcccggcgcatcgagatagccaactgcttgcacctgaatgacacgcaagtcaaaatctggttccagaaccgcaggatgaaacagaagaaaagggaacgagaagggcttctggccacggccattcctgtggctcccctccaacttcccctctctggaacaacccccactaagtttatcaagaaccccggcagcccttctcagtcccaagagccttcgtgaggccggtacttggggccgaaaaactgtggcctgcagaagtcccaggcgacccccatccctatctagacttaggagctcagtttgggatggaggtgggagaacaaaaatgaatagggatttcacttgggaaatgaagtactttagttggcttccgagttccagactatatgtccagatattaattgactgtcttgtaagccacttgtttggttatgatttgtgtcttatcagggaaaaggtgcccagctgccagcccagctccgctgctatctttgcctcacttagtcatgtgcaattcgcgttgcagagtggcagaccattagttgctgagttctgtcagcactctgatgtgctcagaagagcacctgcccaaagtttttctggttttaatttaaaggacaaggctacatatattcagctttttgagatgaccaaagctagttagggtctccttgatgtagctaagctgcttcagtgatcttcacatttgcactccagtttttttttctttaaaaaagcggtttctacctctctatgtgcctgagtgatgatacaatcgctgtttagttactagatgaacaaatccacagaatgggtaaagagtagaatctgaactatatcttgacaaatattattcaaacttgaatgtaaatatatacagtatgtatattttttaaaaagatttgcttgcaatgaccttataagtgacatttaatgtcatagcatgtaaagggttttttttgtaataaaaattatagaatctgaaaaaaaaaaaa

SEQ ID NO: 598 - DNA, 2748 bp, Homo sapiens
  CDS (787)..(2142)
gggctccagctggggccggagaggctgagtggttggtacgctgctcgctggcctcccagtcttcccagcaaccggtgacactgcccgcgccagactgaccactagccgacgcgggcgagagggacaggagcgtgacctccccatcccgaggggccggacgctcgggcgcctccccgctccccccactcggaggccgcgcgcgccgttagccccttcctcgctcccccgccccagtcccgcagtccgggaggcgggggtcggcagccggctgagtgggaaccgcgcggtgtctgaggaggcagtcggcgaccggtttccacttcaagcgtgacccttttgcctgtgggatgagctccagcatggggtgaggtacagaagagagacttgaagagcgtgccttgggactcaagcgccaaacctgtaccctagcgagtgtcctactccgcatccgtaatggaaggaaatgcacatcttactccagaggcacaagaggaggacatcccatgcggctactcctgcccagcgtggtggggcagcagaagctccagagcccagacttgcaggctcacggtgcagggtgaacctggccacagctcaccctggaacagccacaatgtctgccccttagagaagaaccctgaaatcagaccagtttttgcggcctccccctttcctctctgttacagtgccctttccaggccttaagagaagtaaaacttagctgcagcgtcaggaggtggaccccagagtgtgagtggcacgcttctctgtgaacccgtcctcaccatgtttgccacatctggggcagtggcagcggggaagccttactcgtgcagcgaatgtggcaagagcttctgctacagctcagtgctgctgcgacatgaacgagctcacggcggtgacggccgcttccgttgcctagaatgcggtgagcgctgtgcacgggctgctgacctccgagcgcacaggcgcacgcatgctggccagaccctctacatctgcagtgagtgcggacaaagcttccgccacagcggccgtcttgacctacacttgggcgcacaccggcagcgatgccgcacttgcccctgccgcacatgcggccggcgcttcccgcacctcccggcgctgctgctacaccggcgccgccagcatctgccagagcggccccgccgctgcccgctgtgcgcccgcaccttccggcagagcgcgctgctcttccaccaggcgcgggcgcaccccttggggacaacctctgaccctgctgccccaccccaccgctgcgcgcagtgcccgcgagccttccgaagcggcgccgggctgcggagtcacgcgcgcatccacgtgtcccggagccccacgcgaccccgtgtctcagacgcccaccagtgtggcgtgtgcggcaagtgctttggcaagagctctacgctgacgcgacacctgcagacgcactcgggggagaaacccttcaagtgcccggagtgcggcaagggcttcctggagagcgccacgctggtgcgccaccagcgcacacacacgggcgagaagccgtacgcatgtggcgactgtggacgctgcttcagcgagagttccacgctgctgcgccatcggcgcagccatcagggcgagcggccacatgcgtgcgccacttgcggcaagggtttcgggcagcgctccgacctggtggtgcaccagcgcatccacacgggcgagaagcccttcgcgtgccccgagtgcggccgccgcttcagcgaccgctcggacctcaccaagcaccggcgcacgcacacgggcgagaagccctaccgctgcgaactgtgcggcaagcggttcacgtgcgtgtccaatctcaacgtgcatcggcgcaaccatgccggccacaagccacacaaatgccccgagtgcagcaaggccttcagcgtcgcctccaagcttgcactgcaccgcaagacgcacctgggcgaacggccagcggagtgcgcagagtgcggcaagtgcttcagccacagccgctcgctgtcacagcatcagcgggcccacacgcgcgcccgcaccgctgccgccgttgccatccagtccgcagtgggcactgccctcgtctttgaggggccggctgaacaggaaaagccagggttctctgtgtcctagttgagggaggcttgctgaggcttctctaaaggtggttgggcaagcacctatatagtatcacggggacagttgaggcaactcgtagatggagatttgggaaaagacgatgtggcctcctacctttccagtttctgttggcagcccttcacgtagcctcctgcctcgcctctacacctactaccctgtcggcccttttgccatgctgtcctcgtataactcggattctctcctcaggtgtaggtgcagggagtcagggaacccttagactcccctgtgtgcaagagcccaggtgttggtgtgtccctttaatgctactgtgctctctggtgtttctgattttcctgcctttattctgtcttctcttgtcctatctcattccagcccacatcttctcctttcctgattacttttgttgtcctgcctcttcaggtaatggtcacagatttggctgtaggcacgttaccagccctgtggcttcttgactcttggttccctgttaactctgtttctgagaaatgtgggtatggaggtgggtgggaaagctcacttccatgaaggatgtctccatgctaggagctgcctgcagctggcagaggtggccac

SEQ ID NO: 599 - DNA, 1866 bp, Homo sapiens
  CDS (166)..(1455)
ccaacccgtccggacagtccctcaccccggcctgcgctgctgcgtggactcgggcctcaggaattccgctgcggcccaaggcttgccgtttgacgaggagcagtcgcggtaggcggtgggcaaggctgccctgggcggaggccgaggcgcggctcggactccagcatggcgaccgcggtgcgcgctgtgggctgcctccccgtgctgtgtagcgggacggcaggtcatttattggggaggcagtgttccctaaacaccttaccagcagcttccattttggcatggaagagtgttctcggcaatggccatttgtcatcactgggaaccagagacacccatccctacgccagcttgagccgtgcactgcagacacaatgctgtatttcttctcccagtcacctgatgagccagcagtatagaccatatagtttcttcactaaattgactgcagatgagctgtggaaaggcgctttagcagagactggtgctggagcaaaaaaaggaagaggcaaaagaactaaaaagaagaaaagaaaggatctgaacaggggtcagatcattggtgaagggcgttatggttttctatggcccggactgaatgtccctcttatgaaaaatggagcagtgcagaccattgcccaaagaagcaaggaagagcaggagaaggtggaggcagacatgatccagcagagagaagagtgggaccgaaagaagaagatgaaggttaaacgggagcgaggatggagtggaaactcatggggaggcatcagtcttggcccccctgaccctggtccctgtggagaaacatatgaggattttgataccaggatacttgagggaagaaacgttttcactatgactgcgaaagagggaagaaagaaatcgatccgtgtcttggtggctgtggggaacggaaaaggagctgcaggtttttctattgggaaagctactgatcggatggatgctttcaggaaagcaaagaacagagcagttcaccatttgcattatatagaacgatatgaagaccatacaatattccatgatatttcattaagatttaaaaggacgcatatcaagatgaagaaacaacccaaaggttacggcctccgctgccacagggccatcatcaccatctgccggctcattggcatcaaagacatgtatgccaaggtctctgggtccattaatatgctcagcctcacccagggcctcttccgtgggctctccagacaggaaacccatcaacagctggctgataagaagggcctccatgttgtggaaatccgggaggaatgtggccctctgcccattgtggttgcgtccccccgggggcccttgaggaaggatccagagccagaagatgaggttccagacgtcaaactggactgggaagatgtgaagactgcacagggaatgaagcgctctgtgtggtctaatttgaagagagccgccacgtaacctctctggccttgtgcagccagttcctgtgctgccctgcacctaggaaagactcagcccctcacagcttgggatgttaccttgccttttgtttgttttgagggaagtttaatctttaaactctttggaaataaataattatagctttcatttgttgagcacatgttatatgccaatgtgatagaacctttacatacatatctcagttcaagactactttaaatattcatccaaagtaacaaaagtaaatgaattagggagacggggttaataatttgacccaatcagtaataatgtacacaatgataattgctgtagtaattatagctaatatatatgaactcattcatccaaagtgaatgtgattaacttcattttacagagcagttaagtaacttgactaccgtg

SEQ ID NO: 600 - DNA, 3414 bp, Homo sapiens
  CDS (316)..(3318)
gacaaaattcaggcatccaagactcatggtctgtttccagcttcccccggcagtgcatgggctcaagttcgtcccaagacatctgtctgtggacaggggaggaatcgaacacagggttctgtgtctgccctgctctgcccccagaagctagcaacagaccaccagccatccatcctcggtgagccagtaggtggtttgccacaggatcgagacggtgacctggccaggagcttctcccagggctttgtgacctacagtcaggagaacaattccgaaagctctctgcaaagttctagttccctcagcctttccactatgtctgtggccagcctgcctgccgtcaacaagatagatgagtcacgggaaagcagtttagaaggggaccttgcggtgaagtctgtttttcctccggagtccatggggacactccagaggtttaaggatacgcaagagactgaaaccggctataggtacatgaccctacacttcccctaccggcccactccagcctcggagaaagtgcccagtttccaacacagctcagtgtctaactgcttgaccttgcgtgttcactggggctcagaggctgagatccacaagttctccttaggcaagagctctgtgaatctgattgaggtgtcccaggcaaccgtcaagacagagctgaggaggactctgtctttaggtactgtggtctccactgcatataagccaccatctgtggccaagagcttggccccaattgtgtcccaggctacactggccagtagggtagccccaaacctaggccaggcatcagggttcagtaggctggccccaagcctatcccagcatatagcatccagtaaggtatccccaaggctaacctgcccatctatgggtaattgggtgaccccaaggctaccacactcctctgtgcctaatagagtgacaccaagaccagcacagccatctgtggtgactaggaggtccccaagccgaggacacccatcaaggacctttagagtggcctcagaccaaggtcaccaatcaatggctaactgggggtcccaaaacctagcccagccatctatggacagtggggagccctcaagcctagcccagccatctcaagcccctggggtaacctcaaatctggcccagccatctcaagcctttggggtgtctccaagtccagactacccatctcagtctgttggggagtacccaatgctggctcagccatttcagcccactgaggtgtccccaagtccaacctacccatctcaggccattagggagtacccaaccctggcacagccatttcagcccactgaggtatctccaagcccagcccacccatatcagctcactgaggtgtccccaagtgcagcctactcatatcagcccactgaggtgtccccaaacccaggctacctatctatggccattgagatgtccccaagcccagaatacccatctgtggccactgaggtgtccccaagcccaacctacccatatcagcccactgagatatccccaagctcaggctacctatctgtggccactgaggtgtccccaagcccaggctacccatctcagctcactgaggtgtccccaagctcaggctacctatctgtggccactgaagtgtccccaagcccagactactcatctcagcctactgagatgtccccaagctcaggctacctatctatggccactgaggtgtccccaagcccaggctacccatttcagcccactgaggtgtccccaagcccagactatccatgtgtggccactggggagtcccctagccttgcccagccatctcagcccactgaggtgtccccaagctcagcctacccatctgtggtcactggggagtctccaagcctggcccagtcatatcagcgcactgaggtgttcccaagcccagcctacccatttatggccactgagacagaagctgtccccaatccactccagaaaacagtgtctggaaacatggctccgagcagccgctgggacgccatgggccctaaaaattcctacagatccgtgcatggtaggattgttccagaactgctagaaagttctgtggccagggttaggcccttacagtatgtgcaaagacaaccatcccaggcctcagcccgaagtggtgcaaaccccacccacaggccctctgcagaggtaaggcccgtcatctgcactggggagatgacacactcctcggtcattcctccgctggccccgggagttcggagggtgtctctaggctatgagtcttccccaagtggttccctgccacccctttttaaccaggagtcaccgtggagacggcaggactcctatagcccccagaatcctgccgttagtcacaaggcatccctgaactccactatactccagggccccgcggacgctggtgtggttggtggccaatcgtggaaccgcgcatgggagccagccaggggtgctgcgtcctgggacacctggcgcaacaaggcggtggtgcctcccaggcggtccggggagccaatggtgtccatgcaggctgcagaggagatccgcatcctcgcagtgatcactatccaggcgggcgtccgtggctacctggcgcgtcgcaggatccggctgtggcaccggggggccatggtcatccaagctacttggcgcggctaccgtgtgcggcggaacctggcacacctctgcagagccaccacgaccatccagtctgcctggcgcggctacagcacccgccgggaccaagcccggcactggcagatgctccaccccgtcacgtgggtggagctgggcagccgggccggggtcatgtctgaccgaagctggttccaggatggcagagccaggacagtatctgaccatcgctgcttccagtcctgccaggcacacgcttgcagcgtctgccactccctgagctccaggatcgggagcccgcccagcgtggtgatgctagtgggctccagccctcgcacctgtcatacctgtggacgcacacagcccacccgtgtggtgcagggcatgggccagggcactgagggccccggggcagtgtcttgggcctccgcctaccagctggctgccctgagtcccaggcagccgcatcgccaggacaaagcggccacagccatccagtccgcctggaggggctttaagatccgccagcagatgaggcagcagcaaatggcagcgaagatagttcaagccacctggcgaggccaccatacccggagctgtctgaagaacacagaggcgctcttgggaccagcagacccctcggccagctcacggcacatgcattggcctggcatctaggaccctggctccctgcagtggggacttcgtgggaggcactcatggctctctgggtctaatgaataaagtcctccacagcctaaaaaaaaaaaa

SEQ ID NO: 601 - DNA, 3843 bp, Homo sapiens
  CDS (83)..(2245)
tatcctgcgtgatgttggacggccacaaatagattgctgatattgtgaggcagtgagacctaaggtaacctttatcaaaaggatggagttgggaaaaggaaaactactcaggactggactgaatgcgttgcatcaagcagtgcatccgatccatggccttgcctggaccgatgggaatcaagttgtcctaactgatttgcggcttcacagtggagaggtcaagtttggggactccaaagtcattggacagtttgaatgtgtctgtgggttgtcctgggccccacctgttgcagatgatacacctgttctactcgctgtccagcatgagaagcatgtcactgtgtggcagctgtgtcccagccctatggagtcaagcaaatggctgacgtctcagacttgtgagattagaggatcactacctatccttccccagggctgtgtgtggcacccaaaatgtgctattctgactgtgttgactgctcaggatgtctccattttccctaatgttcactctgatgattcccaggtaaaggcagacatcaacacccagggccgcattcactgtgcatgttggacccaggatggcctgaggctggtggtggcagtaggcagcagcctgcattcttatatttgggacagcgctcagaagactcttcacaggtgctcctcctgcctggtgtttgatgtggacagccacgtctgctccatcacagcaactgtggactcacaggttgctatagctactgagcttccattggataagatctgtggcttaaatgcatctgaaacctttaatatcccacctaacagtaaagacatgactccgtatgctttaccagttattggtgaagtacgctctatggataaagaggcaactgattctgaaacaaattctgaagtatcagtttcttcttcctatttagaacctctggatctaactcacatacatttcaatcaacataagtctgagggtaattctcttatttgtctaagaaaaaaggactacttgacaggaactgggcaagattcttcacatttggtccttgtgacctttaagaaggcagttaccatgacgagaaaagtcactattccaggcattctggttcctgatctgatagcatttaatcttaaagcccacgtagtggcagtggcttccaacacttgtaatataattttgatctactctgtcattccatcttcagtcccaaacatccagcaaattcgattagagaacactgaaagaccaaaagggatatgtttcttgacagaccaactattactaattttggtaggaaaacaaaaactcactgatacaacatttcttccttcttcaaagtctgatcagtatgccattagcttgattgttagagaaataatgttggaagaagaaccttcaataacatcaggtgaaagccagactacctactctactttcagtgctccgttaaataaagcaaatagaaaaaagttaattgaaagtctttccccagatttttgtcaccaaaacaaagggctgttgctgacagttaataccagtagtcagaatggaaggcctggaaaaacacttattaaagaaatccagagtcctctgtctagtatctgtgatggctccatagctctagatgctgagcctgttacccagccagcatcgctgcccagacacagcagcacaccagaccacaccagcacactggagcctcctcgtttgcctcaaagaaagaacttacaaagtgaaaaggaaacttatcagctgtctaaggaagtggaaattttatctaggaacctggttgaaatgcaacggtgtctttctgaacttacaaaccgtctgcataatgggaagaaatcctcttcagtgtatccactctctcaagatcttccttatgttcacatcatttaccagaaaccttattatctaggtcctgttgttgaaaaaagagcggtgcttctctgtgatggtaaactaaggctcagtacagttcagcagacttttggcctttctctcattgaaatgctacatgattcccactggattcttctctctgctgacagtgagggctttatcccgttaaccttcacagccacacaggaaataatcataagagatggcagcctgtccaggtcagatgtcttcagagactctttttctcacagtccaggtgctgtttcttctcttaaagtctttacaggccttgctgcccccagtttagataccactggctgttgtaaccatgtagatggcatggcttgatatctgcagtgtccttgctgtgtagctcttcagatgagaccattacaaacaaggcctgcttgacactggacactcgccaatgagactcccactgcactcaggcgaagcgcttgccatggtcggctctcctggtttccccgtttcccctgagctgaggctcgctgctgtgtagcagagctcagtctttattagatggctccgaaagtggtgtttatgtattcatgactgtgtggttttgactaagggcagaattctcagaacaaaacaatattatggtgccatatggatggtgttttatggtttctctgaggctttgtgtcccttgtccaaagctgcattgaagctgtcttaggagcacttaaaagataccttggcattgttataggtctttttcttggcttcaagaggaggttgaggagtctgctggggggcatgtgctctagcatattaacctcaaaccagcaagaattagcagagctccaaggaggaccagagacccactggcttctgctctcaggaacaggaagtggctctgatgttgcctggacctcccagaatttaaaccaaaccctcttgcttccttaacaaattctggctgacgaaggtccaggtactcttaaaaactggccctgggaaaattttgaatgaaatttcaagggaatttgtcccctctgggttccacttgaggttgtgccgatgctgctaccacactgtcgagcccaggtaagtcctactgcaggattttgtgctgtggccactcatgagtgtccctgaaataactttttttttttttaaatccagttttgggatcacgcaactttcctatttttctcccagtagtcagctcccttagttaacttgtcactttaatttgatatttttattttctctccttttaagtcttagagaccagcagagaatctgtgagagaaagtatttcaggaagttagaaattcaaccgaatctgaggtagtcctaaaaagtgccattttgtttcacttatgggctaaagtaccagcttagtcaggtaagagccctgacccacttcagatggtaacaccacttctcactgccttcagatggaatcacagatttcagtcacggcgcataacaaattgatcagtgagtggctaggcatctgcagataaattgtttcagccatagaagctccattagcacatatgcttccttttccccccttcctttaaaatcatctggaaagaaactattttgtgcccttggggactcctgtctgtctgttacagtttaccaagatggagctgggttaggaaagaagtgagggcccattttgtggttcaagtgcactagacagctgctggggtaggaagcacaggcaatgtctgtaatcagctgtgggagagcagtgactgagaacagtctgaggcctggctccacttggaagtatctggggtgcgatgaaatcacaattatcttgaagcctaaagagggaactacaagactgttaactaagatcaatgtgggcacctaaaagggtatgttaaaatcaccatttctcaggtcaaaatactgtgaataagtcttcaataaaatcactaatggttaaaaaaaaaaaa

SEQ ID NO: 602 - DNA, 1764 bp, Homo sapiens
  CDS (37)..(1314)
ctgacagcctgccaatgtgcctgtctcccacctgccatgaacacggggggctccctacctgacctcaccaacctgcactttcccccaccactgcccacccccctggaccctgaagagacagcctaccctagcctgagtgggggcaacagtacctccaatttgacccacaccatgactcacctgggcatcagcaggggcatgggcctgggcccaggctatgatgcaccaggacttcattcacctctcagccacccatccctgcagtcctccctaagcaatcccaacctccaggcttccctgagcagtcctcagccccagcttcagggctcccacagccacccctcttctgccgtgcctcctccttggcccgccatgtactgcccaccacctccctgggccaccccctcactcagtgctccggctctctcctcctcctattccacgtcatccacatcatctcctgttctgggcgccccctcttaccctgcttataagcctggggcctccccccaccaccgccgtgtgcccctcagccccctgagtttgctcgcgggcccagccgacgccagaaggtcccaacagcagctgcccaaacagttttcgccaacaatgtcacccaccttgtcttccatcactcagggcgtccccctggataccagtaaactgtccactgaccagcggttacccccatacccatacagctccccaagtctggttctgcctacccagccccacaccccaaagtctctacagcagccagggctgccctctcagtcttgttcagtgcagtcctcaggtgggcagcccccaggcaggcagtctcattatgggacaccgtacccacctgggcccagtgggcatgggcaacagtcttaccaccggccaatgagtgacttcaacctggggaatctggagcagttcagcatggagagcccatcagccagcctggtgctggatccccctggcttttctgaagggcctggatttttagggggtgaggggccaatgggtggcccccaggatccccacaccttcaaccaccagaacttgacccactgttcccgccatggctcagggcctaacatcatcctcacaggggactcctctccaggtttctctaaggagattgcagcagccctggccggagtgcctggctttgaggtgtcagcagctggattggagctagggcttgggctagaagatgagctgcgcatggagccactgggcctggaagggctaaacatgctgagtgacccctgtgccctgctgcctgatcctgctgtggaggagtcattccgcagtgaccggctccaatgagggcacctcatcaccatccctcttcttggccccatcccccaccaccattcctttcctcccttccccctggcaggtagagactctactctctgtccccagatcctctttctagcatgaatgaaggatgccaagaatgagaaaaagcaaggggtttgtccaggtggcccctgaattctgcgcaagggatgggcctgggggaactcaagggagggcctaaagcacttgtaactttgaaccgtctgtctggaggtcagagcctgttggaaagcaggggtagaggggagccctggaagcagggcttttccggatgcctaggggtgggcagtgccagcccctcctcaccactcttccccttgcagtggaggagagagccagagtggatactattttttattaaatatattattatatgttaataaaaaaatcatatcaaaaaaaaaaaaaaaa

SEQ ID NO: 603 - DNA, 4683 bp, Homo sapiens
  CDS (261)..(3017)
gagctagcgctcaagcagagcccagcgcggtgctatcggacagagcctggcgagcgcaagcggcgcggggagccagcggggctgagcgcggccagggtctgaacccagatttcccagactagctaccactccgcttgcccacgccccgggagctcgcggcgcctggcggtcagcgaccagacgtccggggccgctgcgctcctggcccgcgaggcgtgacactgtctcggctacagacccagagggagcacactgccaggatgggagctgctgggaggcaggacttcctcttcaaggccatgctgaccatcagctggctcactctgacctgcttccctggggccacatccacagtggctgctgggtgccctgaccagagccctgagttgcaaccctggaaccctggccatgaccaagaccaccatgtgcatatcggccagggcaagacactgctgctcacctcttctgccacggtctattccatccacatctcagagggaggcaagctggtcattaaagaccacgacgagccgattgttttgcgaacccggcacatcctgattgacaacggaggagagctgcatgctgggagtgccctctgccctttccagggcaatttcaccatcattttgtatggaagggctgatgaaggtattcagccggatccttactatggtctgaagtacattggggttggtaaaggaggcgcacttgagttgcatggacagaaaaagctctcctggacatttctgaacaagacccttcacccaggtggcatggcagaaggaggctgtttttttgaaaggagctggggccaccctggagttattgttcatgtcatcgaccccaaatcaggcacagtcatccattctgaccggtttgacacctatagatccaagaaagagagtgaacgtctggtccagtatttgaacgcggtgcccgatggcaggatcctttctgttgcagtgaatgatgaaggttctcgaaatctggatgacatggccaggaaggcgatgaccaaattgggaagcaaacacttcctgcaccttggatttagacacccttggagttttctaactgtgaaaggaaatccatcatcttcagtggaagaccatattgaatatcatggacatcgaggctctgctgctgcccgggtattcaaattgttccagacagagcatggcgaatatttcaatgtttctttgtccagtgagtgggttcaagacgtggagtggacggagtggttcgatcatgataaagtatctcagactaaaggtggggagaaaatttcagacctctggaaagctcacccaggaaaaatatgcaatcgtcccattgatatacaggccactacaatggatggagttaacctcagcaccgaggttgtctacaaaaaaggccaggattataggtttgcttgctacgaccggggcagagcctgccggagctaccgtgtacggttcctctgtgggaagcctgtgaggcccaaactcacagtcaccattgacaccaatgtgaacagcaccattctgaacttggaggataatgtacagtcatggaaacctggagataccctggtcattgccagtactgattactccatgtaccaggcagaagagttccaggtgcttccctgcagatcctgcgcccccaaccaggtcaaagtggcagggaaaccaatgtacctgcacatcggggaggagatagacggcgtggacatgcgggcggaggttgggcttctgagccggaacatcatagtgatgggggagatggaggacaaatgctacccctacagaaaccacatctgcaatttctttgacttcgatacctttgggggccacatcaagtttgctctgggatttaaggcagcacacttggagggcacggagctgaagcatatgggacagcagctggtgggtcagtacccgattcacttccacctggccggtgatgtagacgaaaggggaggttatgacccacccacatacatcagggacctctccatccatcatacattctctcgctgcgtcacagtccatggctccaatggcttgttgatcaaggacgttgtgggctataactctttgggccactgcttcttcacggaagatgggccggaggaacgcaacacttttgaccactgtcttggcctccttgtcaagtctggaaccctcctcccctcggaccgtgacagcaagatgtgcaagatgatcacagaggactcctacccagggtacatccccaagcccaggcaagactgcaatgctgtgtccaccttctggatggccaatcccaacaacaacctcatcaactgtgccgctgcaggatctgaggaaactggattttggtttatttttcaccacgtaccaacgggcccctccgtgggaatgtactccccaggttattcagagcacattccactgggaaaattctataacaaccgagcacattccaactaccgggctggcatgatcatagacaacggagtcaaaaccaccgaggcctctgccaaggacaagcggccgttcctctcaatcatctctgccagatacagccctcaccaggacgccgacccgctgaagccccgggagccggccatcatcagacacttcattgcctacaagaaccaggaccacggggcctggctgcgcggcggggatgtgtggctggacagctgccatttcagaggggaggctcaggaaggcttcttgcttacaggaatgaaggctgggggcattttgctggggggagatgaggcagcctctggaatggctcagggattcagccctccctgccgctgcctgctgaagctggtgactacggggtcgcccctttgctcacgtctctctggcccactcatgatggagaagtgtggtcagaggggagcaatgggctttgctgcttatgagcacagaggaattcagtccccaggcagccctgcctctgactccaagagggtgaagtccacagaagtgagctcctgccttagggcctcatttgctcttcatccagggaactgagcacagggggcctccaggagaccctagatgtgctcgtactccctcggcctgggatttcagagctggaaatatagaaaatatctagcccaaagccttcattttaacagatggggaaagtgagcccccaagatgggaaagaaccacacagctaagggagggcctggggagccccaccctagcccttgctgccacaccacattgcctcaacaaccggccccagagtgcccaggcactcctgaggtagcttctggaaatggggacaagtcccctcgaaggaaaggaaatgactagagtagaatgacagctagcagatctcttccctcctgctcccagcgcacacaaacccgccctccccttggtgttggcggtccctgtggccttcactctgttcactacctgtcagcccagcctgggtgcacagtagctgcaactccccattggtgctacctggctctcctgtctctgcagctctacaggtgaggcccagcagagggagtagggctcgccatgtttctggtgagccaatttggctgatcttgggtgtctgaacagctattgggtccaccccagtccctttcagctgctgcttaatgccctgctctctccctggcccaccttatagagagcccaaagagctcctgtaagagggagaactctatctatctgtggtttataatcttgcacgaggcaccagagtctccctgggtcttgtgatgaactacatttatcccctttcctgccccaaccacaaactctttccttcaaagagggcctgcctggctccctccacccaactgcacccatgagactcggtccaagagtccattccccaggtgggagccaactgtcagggaggtctttcccaccaaacatctttcagctgctgggaggtgaccatagagctctgcttttaaagatatggctgcttcaaaggccagagtcacaggaaggacttcttccagggagattagtggtgatggagaggagagttaaaatgacctcatgtccttcttgtccacggttttgttgagttttcactcttctaatgcaagggtctcacactgtgaaccacttaggatgtgatcactttcaggtggccaggaatgttgaatgtctttggctcagttcatttaaaaaagatatctatttgaaagttctcagagttgtacatatgtttcacagtacaggatctgtacataaaagtttctttcctaaaccattcaccaagagccaatatctaggcattttcttggtagcacaaattttcttattgcttagaaaattgtcctccttgttatttctgtttgtaagacttaagtgagttaggtctttaaggaaagcaacgctcctctgaaatgcttgtcttttttctgttgccgaaatagctggtcctttttcgggagttagatgtatagagtgtttgtatgtaaacatttcttgtaggcatcaccatgaacaaagatatattttctatttatttattatatgtgcacttcaagaagtcactgtcagagaaataaagaattgtcttaaatgtcatgattggagatgtcctttgcattgcttggaaggggtgtacctagagccaaggaaattggctctggtttggaaaaattttgctgttattatagtaaacatacaaaggatgtcaaaaaaaaaaaaa

SEQ ID NO: 604 - DNA, 1453 bp, Homo sapiens
  CDS (30)..(1073)
ccctgctgttcgtggcatttgccctgtgtatgttttgcctgtacagcttcatgccattggtgattaaagtcactagtgccacttccgtcaacctgggcatcctgacagcggacctctacagcctttttgttggactctttctgtttggctataaggtaattcagtccagtggtttttcagactttttctatccacatcatcacagcatttacaagcgtaacctgctgccatcagcaatgggtcctattacctgtactaattctcaaggcagtagtcacactgcttccctgtacatcatgggggagttggatgtccaaagtaccaggcacagaaaccctaaccaagtggctgataacctaatcaaattgagagcatttttcacatctcataatggacttgaaaacaattataaatctgaaataagtgagaataaaaagaatattttgaaaacaattgccctgggtcagatgttgtccttgtgtatatgtgggacagccatcaccagccagtatttggcagaaagatacaaagtgaacacccccatgcttcagagctttatcaattattgcttgctgttcctaatttatacagtgatgctggcatttcgatcaggcagtgataaccttttagtaatcttgaaaagaaaatggtggaagtacatcctgctgggactagcagatgtggaagctaattatgtgatcgtcagagcctaccagtacacaactctaaccagtgtccagcttttggattgctttgggattcctgtgttgatggctctgtcatggtttattcttcatgcaagatacagagtgatccacttcatcgccgtggctgtctgtctgttgggtgtaggaaccatggttggtgcagacatactagcagggagggaagacaattcagggagtgatgtattgattggtgacatcttggtccttcttggggcttccctctatgccatttcaaatgtttgtgaggaatacatcgtgaagaagctgagcagacaggagtttttaggaatggtgggcctgtttggaacaattatcagtggctatacagctattgattgtggaatataaggatattgccagcattcattgggactggaaaattgccctgctgttcgtggcatttgccctgtgtatgttttgcctgtacagcttcatgccattggtgattaaagtcactagtgccacttccgtcaacctgggcatcctgacagcggacctctacagcctttttgttggactctttctgtttggctataagttttcaggactctacatcctgtccttcactgtcatcatggtggggtttatcctgtactgctccacccctactcgcacggccgagccggctgaaagcagcgtgcctccagtcaccagcattgggattgacaacctgggggctgaagctggaggagaacctccaggagacccactctgctgtcttgtag

SEQ ID NO: 605 - DNA, 1415 bp, Homo sapiens
  CDS (29)..(784)
gaggctgcgcccgcccgcgcccggggtgatgcagttgccccccgcgctgtgcgcccgcctcgctgcggggcccggggcggcggagccgctgcctgtagagcgggatcccgcggctggggccgcgccctttcgcttcgttgcgcgccccgtgcgcttcccgcgggagcaccagttcttcgaggatggggacgtgcagcgccacctctacctccaggacgtgatcatgcaggtggccgacgtgcctgagaagcccagggtgcccgcgtttgcctgccaggtggccggctgctgccaggtgttcgatgccctggacgactacgagcaccactaccacacgctgcacggaaatgtttgctccttttgcaagcgggccttcccttccggacacctgctggacgcccacatcctggagtggcacgattcgctcttccagatcctgtctgagaggcaggacatgtatcagtgcttggtagaaggctgcacagagaagttcaagaccagcagagaccggaaggatcacatggtgaggatgcacctgtaccccgcggacttccggtttgataagccaaagaaaagcagaagcccagcctcagcagaagccccaggggacagtggagagcggtcagaaggggaggccatggaaatctgctctgagcctgtggcagcctcccctgcaccggcaggtgagaggcggatctacagacatagaataccctctaccatctgctttggtcagggtgccgctcgaggatttaaaagcaacaagaagaaaaccaaacaatgctgatagactcagaaaaggagtggggggcagtcaccactgctgggcgtggcatccgccttgggcctttctccgaccttctggtgtggccgccctgggggccaggccctcgccatcctccccatccttgttcctcagcaaatggcattagcagctgtcatcagaagctgtgagggacccacagattttggaaacgacctggacacactattgggaaggagatgtggacggcctgtctcctcctgcagggcccaccctaagaatgtcatcactcaccacatcgacctaagtatccaccactgcaccaccaccccccccaccaacaaccacacccccaccaccacaacaacccgcccacgcacaccacgaggcaaaagcacgcgccccaacgggccccaaaccgacgccaccgcgaacaccacaacaacacagtgcacccagcaggcggccacaaaacaagccgagggcacaccccacataaagaggccgcccgccgacacaaccgcgaacaacgacccggggtccaccgggatgaccaccacacgaccgcaaacaaacaaaccaacgagcggccacaacacaagcacacgcccaccaccgaaaaccaaccacaacgcgacaaccaacacgacga

SEQ ID NO: 606 - DNA, 891 bp, Homo sapiens
  CDS (104)..(775)
aaggatccttaattaaattaatcccccccccccggggcggcccagcggatcgtgccgcggcggccgagcgcagctacaggagggtgtccagaagccacaagccatggctgtggggaacatcaacgagctgcccgagaacatcctgctggagctgttcacgcacgtgcccgcccgccagctgctgctgaactgccgcctggtctgcagcctctggcgggacctcatcgacctcgtgaccctctggaaacgcaagtgcctgcgagagggcttcatcactgaggactgggaccagcccgtggccgactggaagatcttctacttcttacggagcctgcacaggaacctcctgcacaacccgtgcgctgaagaggggttcgagttctggagcctggatgtgaatggaggcgatgagtggaaggtggaggatctctctcgagaccagaggaaggaattccccaatgaccaggttcgcagccaggccagattgcgggtccaagtaccagctgtgcgttcagctcctgtcgtccgcgcacgcgcctctggggaccttccagccagacccggcgaccatccagcagaagagcgatgccaagtggagggaggtctcccacacattctccaactacccgcccggcgtccgctacatctggtttcagcacggcggcgtggacactcattactgggccggctggtacggcccgagggtcaccaacagcagcatcaccatcgggcccccgctgccctgacaccccctgagcccccatctgctgaaccctgactggtaaacaactgctgtcagaaaagggctgggcttgggaaggggaggtggaggccaggtgtccccagacctctaacccttgcccctagcaggctcttctttgtggagcctct

SEQ ID NO: 607 - DNA, 750 bp, Homo sapiens
  CDS (134)..(679)
aaggatccttaattaaattaatcccccccccccccccccggccagacgcggagggaaggagctacgagtagccgccgagaggccgcggagccagcgacgaccgacccagccgagccgccgccgccgcgcccccatggcggccgccaaggacactcatgaggaccatgatacttccactgagaatacagacgagtccaaccatgaccctcagtttgagccaatagtttctcttcctgagcaagaaattaaaacactggaagaagatgaagaggaactttttaaaatgcgggcaaaactgttccgatttgcctctgagaacgatctcccagaatggaaggagcgaggcactggtgacgtcaagctcctgaagcacaaggagaaaggggccatccgcctcctcatgcggagggacaagaccctgaagatctgtgccaaccactacatcacgccgatgatggagctgaagcccaacgcaggtagcgaccgtgcctgggtctggaacacccacgctgacttcgccgacgagtgccccaagccagagctgctggccatccgcttcctgaatgctgagaatgcacagaaattcaaaacaaagtttgaagaatgcaggaaagagatcgaagagagagaaaagaaaggatcaggcaaaatgatcatgccgaaaaagtggcggaaaagctagaagctctctcggtgaaggaggagaccaagggaggatgctgaggagaagcaataaatcgtcttatttta

SEQ ID NO: 608 - DNA, 2304 bp, Homo sapiens
  CDS (667)..(1782)
cctttatttacatatttaagctaggaactactattttgttttaattgcgtacattttgcttggaaatcacaggaagaaacacaacaaagcattgcccaaggtacagaaacaataataaacgtacttaaaactcatttaaattccagcatttttctccttattttagaagtttaacatttcagaagcagacactgcctcccttcctgcaacaactttctcctcttaagtctcatttttccccagtttcaagggcgaattctagaactccccggaaccgccaccagttaaccagaattccgtggctttggaaaataaaactgctgttatagctcttctgggtatttgagaaatgcacttgtgaagggttagagttgaatcttttgatgcgaaagtcgggttttcctgatactgggattcctgggattccaggtgttggggtggcccaattcctgcgagaagcaatagcgggcggtaacatgaggagcacggtgcgtccagcgagtccttccgcctggggccctgccgaccccctgcctgcgcccccaggactctggcctcacccggccgtgccggggcctctgtgacgcggcgttccaggcactcggccccggccgagcccgtagctagagcggctcagagacaggaggcggcggcagcagcggcggcatgaaccactgccagctaccggtggtgatcgacaacggctcgggaatgatcaaggcgggcgtggctgggtgccgggagccccagtttatctacccgaacattatcggccgcgccaagggccagagccgcgcggcccagggcgggctagaactctgcgtgggcgaccaagctcaggactggaggagctcgctgttcatcagttacccagtggagcgtggtctcattacttcatgggaggacatggagatcatgtggaagcatatctatgactataacctaaagctgaagccgtgtgatggcccagtcttgattactgagccagcgctgaacccactggccaaccggcaacagatcacggaaatgttttttgagcatctgggtgttcctgccttctatatgtccatccaggctgtgctggctctctttgctgctggcttcactactggccttgtgctgaattcaggtgctggggttacccagagtgtgcccatctttgagggttactgtctgcctcatggtgtgcagcaactggatctggcaggccttgacctcaccaactacctcatggtgctaatgaagaaccatggtatcatgttgctcagtgcttcagacagaaagattgttgaagacatcaaggagagcttttgttatgtggcaatgaactacgaagaggaaatggccaagaaacccgattgtctagagaaagtttaccaactacctgatgggaaggtcatccagctccatgaccagctcttttcttgtccagaggccctcttctctccgtgtcatatgaaccttgaggcccctggcattgataagatatgcttcagcagcataatgaaatgtgatacaggcctgaggaattccttcttttccaatattatccttgccgggggatcaacctctttccctggtttagacaagcggttagttaaggatatagcaaaggtggctcctgccaacaccgctgtgcaagttatagctcctccagaaaggaaaatatcagtgtggatgggaggttctattcttgcatccttgtctgccttccaggacatgtggatcactgctgcagaatttaaagaagttggacccaacatagtacaccaaagatgcttctgaaatacagataaaatggttggaagaaaatgttttgagtatatgtgacagaaaactttggatattatatgtttctgggagaagagaaaatacttcacctattgggatgccaatatttctgttgtatttctataatgggtttgggggataataatggtgaagctcaagaacagatgtctattgagtagaaccaagttaaaataatgtttcccatagtgtttcttctataacttgacgttggtgagcttatatttcccttggaagagagcatttgtggtacaatatgctatgtgccaaatgagtgataagatttaagcttattgaagtttagggaaagaaggttgctgtggtgaggaacgagactccatagcagaggtatgccatcatggaaggggtggcattgggatggagcgcagatatccaggcaagcatactaaaatgaacaagttgctaaagatgagaatgaacaaagcatattcagggcatgtttaatagactgattttgtttttaaaaaaaaaaaa

SEQ ID NO: 609 - DNA, 1581 bp, Homo sapiens
  CDS (160)..(1578)
cggaatttccgggtcgacgatttcgtcgggcttcttccccatcacaccctcctagttgccctggtgactgtgtgacccctctcccccctccaccgcctgctgccacggccggccgtataaatagaggcgaggagcagctgggctctcttggcagtcaccatgagggcgctggtcctgctcggctgcctcctggcctcgctcctgttctcaggacaagcagaagagacggaggatgcaaatgaagaagccccattgagggaccgctcccacatcgagaagaccctcatgctgaatgaggacaagccatccgatgactactctgcggtgctgcagcggcttcggaagatctaccactcatccatcaagcctctggagcagtcctacaagtacaatgagctccggcagcatgagatcacagatggagagattacctccaagcccatggtactgttcctgggaccgtggagtgttggtaaatctaccatgataaactacctccttgggctggaaaatactcgctatcagctctatacaggcgctgaacccaccacctctgagttcacggtcctcatgcatgggcctaagctgaaaaccatcgagggcatcgtcatggctgctgacagcgcccgttccttctcaccccttgagaagtttggccagaatttcctagagaagctgattggcattgaggttccccacaaacttctggagagggtcacttttgtggatacaccaggcatcatcgagaaccgcaagcagcaagaaagaggctaccccttcaacgacgtgtgccagtggttcatcgacagagctgacctcatctttgtcgtctttgacccaacaaagctggatgtgggtctagagctggagatgctcttccgccagttgaaggggcgtgaatcccagataaggatcatcctgaacaaggctgacaatctggccacccaaatgctcatgcgggtttacggggccctcttctggagcttggcccctctcatcaatgtcacagagcccccaagggtttacgtcagctccttctggccacaagagtataagccggacacccatcaggaactgttcctccaagaagagatctccctcctagaagacctgaatcaggtgatcgagaacagactggagaacaagattgccttcatccgccagcacgccatccgggtccgcatccacgccctcctggttgaccgctacctgcagacttacaaggacaaaatgaccttcttcagtgatggagaactggtctttaaggacattgtggaagatcccgataaattctacatcttcaagaccatcctggcaaagaccaatgtcagcaaatttgaccttcccaaccgcgaggcctataaggacttcttcggcatcaatcccatttccagtttcaaactgctctcccagcagtgctcctacatgggaggttgctttctggagaagattgagcgggccatcactcaggagcttccgggcctcctgggtagcctcgggctcgggaagaatccaggtgctctcaactgtgacaaaacagggtgtagcgaaacaccaaaaaatcgctacaggaagcactag

SEQ ID NO: 610 - DNA, 1834 bp, Homo sapiens
  CDS (895)..(1746)
ctcataagataatcgttatgtaccttcaggtgttagagtgtgagcgtaaccaacacctggtccagacctcatgggtagcctctgagggtaagtgactaagacttctcctctgctgtccaagcgctttggtgcagggacagcggcatcttcagccaatccagtgcaggctctccaccgaaggctggctctagactggtgttggcagcggctctgatgagcccgagaagaggcctgcccttgggtgcggagtctccctgcgcacgatgctcccacgcgtccaacttgcacccaaggggcttttccctcttccaagtggactccttcaaggaagctgcagctcggtcagcagagaaggggcctgccgccagcgccctggaggaagaggaagaggaacccaagaggatggcttgtctcccagcagccacaccggctttgtgctcagccagttcatttgagtttgcatgtttctctgcactatggattttgagcatttagatttctttaatcaaaagcgttttagtgactccagtagacattttctttctgaggcatcgtgctttgcatgagagcaggccaaggttgaggggaaaagtaaagttaaagtcggttctctttcatagcaacacgtattgtctgacattcagccagcttttttttttttctaataatttctgtgcctttctgtcctgtatttactgtatttagaaaaagcagctagaatatttctccattaactcttgagattcacaggactgtctagctctgagtcctagcaatagactccttagaggagtagtacgtttatctagattttctctagataatgcaggcggaagacctgggttcccgggtggggcattgcagttcttcctgtgtttggcttccaggaattacatgaacgacagccttcgcaccgacgtcttcgtgcggttccagccagagagcatcgcctgtgcctgcatttatcttgctgcccggacgctggagatccctttgcccaatcgtccccattggtttcttttgtttggagcaactgaagaagaaattcaggaaatctgcttaaagatcttgcagctttatgctcggaaaaaggttgatctcacacacctggagggtgaagtggaaaaaagaaagcacgctatcgaagaggcaaaggcccaagcccggggcctgttgcctgggggcacacaggtgctggatggtacctcggggttctctcctgcccccaagctggtggaatcccccaaagaaggtaaagggagcaagccttccccactgtctgtgaagaacaccaagaggaggctggagggcgccaagaaagccaaggcggacagccccgtgaacggcttgccaaaggggcgagagagtcggagtcggagccggagccgtgagcagagctactcgaggtccccatcccgatcagcgtctcctaagaggaggaaaagtgacagcggctccacatctggtgggtccaagtcgcagagccgctcccggagcaggagtgactccccaccgagacaggccccccgcagcgctccctacaaaggctctgagattcggggctcccggaagtccaaggactgcaagtacccccagaagccacacaagtctcggagccggagttcttcccgttctcgaagcaggtcacgggagcgggcggataatccgggaaaaatccagcagaaaagtcattactacagagatcaggagaaagcggtcgaggcgttgaacgcaacggccggtgtatgacgggacaccgggcgaggatcagggggaggggtgcgaagggcagcctccggggagaggctgccgggctgacgggcagcaggcaagt

SEQ ID NO: 611 - DNA, 2835 bp, Homo sapiens
  CDS (49)..(1710)
atatgatcagtaaacctgcctccctccttgtggccctgggaggaagccatggactctaccaagtctgaacccctgaagggatcaccagaggctgaagatggaaacattgaatataaattgaagctggtgaatccatcccagtaccgctttgagcacctggtgacacaaatgaagtggcggctccaggagggacgtggtgaggccgtctaccagattggggtagaggacaatgggctgctggtggggctggctgaggaggaaatgcgagcttcgctcaagaccctgcaccggatggcagagaaggttggggcagacataaccgttcttcgagagcgagaagtggattatgatagcgacatgccccggaagatcaccgaggtgctagtacgaaaggtccctgacaaccaacagttcctagacctccgtgtggccgtcctggggaatgtggactctgggaagtcaactctgcttggagtcctgacccagggagagctggacaatgggcggggccgggctcggctcaaccttttccgccacctgcatgagattcagtctggccgaacctccagcatcagcttcgagatcctgggctttaacagcaaggaagaggtggtgaattacagcgactcacggacagcagaagagatctgtgagagcagctccaagatgatcaccttcatcgacctggcaggccaccataagtacctacacaccaccatctttggcctcacatcatactgccccgactgcgccctgctcctcgtcagtgccaacactgggattgctggcaccacaagggaacatctggggctggccctggccctgaaagtgcccttcttcatcgtggtcagcaagatcgacctatgtgccaagaccacagtggagaggacagtacgccagctggagcgggtcctcaagcagcctggctgccacaaggtccccatgctggtcacctctgaggatgatgccgtcactgctgcccagcagtttgctcagtcacccaatgtcacccccatcttcacattgtccagtgtgtctggagagagtctggacctcctcaaagtctttctgaatattctgccaccactcaccaacagcaaagagcaggaggaactcatgcagcagctgacggagttccaggtggatgaaatctacacagtaccagaggtggggactgttgttggaggaacactttccagtgggatttgccgtgagggggaccagctggtggtgggccccacggatgatggctgcttcctggagctgagagtatgcagcatccagcgcaaccgctctgcctgtcgtgtgctgcgagctggtcaggctgctacactggcgcttggggactttgaccgtgcactgcttcgcaagggcatggtgatggtgagcccggagatgaatcctaccatctgctcggtgtttgaggcagagatagtcttactgttccatgccaccaccttccgacgaggattccaggtgacagtacacgtgggcaacgtacgtcagacggcagtggtggaaaagatccatgccaaggacaaactgcggacaggcgaaaaggcagtggtacgtttccgcttcctgaaacacccagagtacctgaaggtgggcgccaaactgctgttccgggagggtgtcaccaagggcatcggccatgtcactgatgtacaagccattacagcaggagaagcccaggccaacatgggcttctgaacccttcaggcagggacagttctattgctgtccctacaatatataaggtgacttctggccatgctgccctgccattggcggctctgtgtgttaataggctagggagagaggggtgctgtctgccacttgctccctgccaactttctggagaggtgccaaacttggtgtggccaggaaagggcagtcctgagggagaagacaggattcagggcagtgctccgaagctgtgtgctcacctggttggctcatcaaacctggcaaccctgtggcctgtctgccggagctgactggatccactcatcaattcttcgtccccactactaagactgggcatgttttgctggtgtggtctctgcacttcaggaatggtcacaacagggggtagccctcaaaagcactcctttttctatacctcttctcaaggccatgtaagttgcccatctctacctggctgtggacaaaaggttatctgctcttggccatctggtggtggtggcggcccagagtctgaagaaatggcacagggacagtgaatggtagtgttgccaccctgtgctgaggcctgaggcctcttcctcagctttatctccctttccttcactcaagggccatttccccagtccctatctcccccatcccctcccggcttataggccccacaggtgctatttgttgtgctggcccaggcgtggggctaccaagcaaaggcttggcatataccaaaggccagctgcatgcccatcagtctggtctttttcctctgcggtcatgttggctttcatgctggatcaaatgttttactttcccagactggtggcatctgagttccccatcctaccactctcaccccactttcctgccccacctaaaccctcgttttagtaatttgtagtgactgttcccttccctctgttgcagggaaccaggaggaaagggaaagatgttgccatatttcctactctttaggcatggactctcctttccctttgttagtgtcctgggttcccatggactcagggatttgttggctaaggtttctctgtgcatatatatatatatacatatgtatatatatttaaatacacatatatattgtacagctcgtgccgaattcggcacgag

SEQ ID NO: 612 - DNA, 1044 bp, Homo sapiens
  CDS (117)..(389)
ctccggggtaggtgggtgacggcgggcggaggtgtacgagggagccgtggaggtccaagtgagtgcttatgaaactgcacagcatctgatgaaactagcgaataagaacatcaaccatgtcttacactccaggagttggtggtgaccccgcccagttggcccagaggatctcttctaacatccagaagatcacacagtgttctgtggaaatacaaagaactctgaatcaacttggaacacctcaagattcacctgaattgaggcaacagttgcaacagaagcagcagtatactaaccagcttgccaaagaaacagataagtacattaaagagtttggatctctgcccaccacccccagtgaacaggtatcaagctttaagacacattgttgatgtattgaatgtgaaaaaaacccagtgcactgtaggatctttgaactgttacgctagaaaggaaattatgctagaaaggaaatcaaaaataattctgtttgagattagttcacagaacacaaaactatatttaattgctcaggtagtatcctgtggttcaataaagcaaaaattatttccatgcatttgccctgacccataattaagttagttctcagaaaatgcttcctgagtaattatttcctggccttccggggctgactgcgtggaacatgcaggctcattcaagatgtgaggtgtcctgggggcacatatttatttccctgcttatttaatggaagttattacttagctaaaagtataaggctttatttgcctgaaaaagaattactttaaaatagcctcaaaataataagctagtttttagcagcgtgaaaacctgaggtgagaaatccagcataatgggtcttttgcctcaagttaaatatgcacagtatttgacatactatcagaatgttactgagagttaatctgtaaggccctgtaattggggagtaagtgaaaacttcagggttaaataaagagccaactaccgcaaattcagttgaacttcacagctagattctagttggctttttcttctctttcctct

SEQ ID NO: 613 - DNA, 5203 bp, Homo sapiens
  CDS (63)..(2894)
tttcgtctaacgacaggcgcctccggcccatttacgattatcttgacaatggtaataataaaatggcaattcagcaagcagataaactgttgaagaaacataaggatcttcattgtgctaaggttttaaaggcaattggtttacagagaactggaaagcaagaggaagcctttactcttgcacaggaggtggcagcccttgaacccacagatgacaactcactgcaggcactgactatcctttaccgggagatgcaccgaccggagttagttacaaaactttatgaggcagctgtgaagaaagttcccaatagtgaggagtatcactctcacctcttcatggcctatgccagagtgggtgaatacaagaaaatgcaacaggctggcatggctctatataagattgtccccaaaaatccctactacttttggtctgtgatgagcttaattatgcaatctatatcggcacaggatgaaaacctctcaaaaacaatgtttctgccccttgctgagagaatggtcgaaaaaatggtgaaagaggacaagatagaagctgaggctgaagttgaactttattatatgatcctggaacgtttgggaaagtaccaggaggccttggatgtcatcagagggaaattaggagagaagttgacaagtgagattcagagtcgggaaaataaatgcatggctatgtacaagaagctgagcaggtggccagagtgcaatgccctttcccggcgcctcttactaaaaaactcagatgactggcagttctatctgacttatttcgattctgtctttcgactgattgaagaggcctggagtcctcctgctgaaggtgaacactctttagaaggagaagtacattattctgcagaaaaagctgtgaagtttatagaagatcggataacggaagaatctaaaagttctcgccatctccgaggaccacatctagctaaattggagctgattaggcgtttacgaagtcaaggttgtaacgatgagtacaaactgggtgatccagaagaattaatgttccagtattttaaaaagtttggcgataaaccttgttgttttacagaccttaaggtgtttgttgacctcttacctgctacacagtgtacaaaatttattaatcagttacttggagttgttcctttgtcgacaccaacagaggataagctggcactgcctgctgacatcagagctctgcagcaacatttgtgtgtggtgcagctgacgaggttacttggcttgtaccacaccatggataaaaatcagaaattgagtgtggtcagagaattgatgttaaggtaccagcatggactggaatttgggaaaacctgtttgaaaacagaattgcaattttctgactattactgtctccttgctgtccatgcgcttattgatgtatggagggaaacaggtgatgagaccactgtgtggcaggccctgactttgctggaagagggattaacccatagcccttccaatgctcagttcaaattgctgcttgttcgaatctactgtatgctgggtgcatttgaaccagtggtggatctttactccagcctcgatgctaagcatatccagcatgataccattggttatcttttgacccgatatgctgaatctctaggtcagtatgctgctgcgtcccaatcctgtaacttcgcactcaggttttttcactccaaccagaaagatacctcagaatatattattcaagcttacaaatatggtgcatttgagaagatcccagagtttatcgcttttaggaacaggctgaataattctcttcattttgcacaagtccgtactgaacggatgctgttagaccttctacttgaagcaaatatatcaaccagtttagcagaaagtataaagtcaatgaaccttaggccagaagaagatgacattccatgggaagatttgcgagacaacagagacttaaatgtttttttcagctgggatccaaaagacagggacgtttctgaagaacataagaaactttccttagaggaggagaccttgtggttaagaatccgatccttaacattgaggctgataagtggacttccaagtctcaaccaccctgtggagccaaagaactcggagaagactgccgagaatggggtatcctcccggattgatattcttcgtttgctccttcaacagctggaggcaaccctggagacaggaaagcgatttattgagaaggatattcagtatcctttccttggtcctgtacctaccagaatgggtggattctttaattctggctgttctcagtgccagataagctctttttatcttgtcaatgatatttatgagctggataccagtggtttagaggatacaatggagattcaggaacgaatagaaaatagttttaagtctttactagaccagttaaaagatgtcttcagtaaatgtaaaggtgacctcttagaagttaaagatggtaacttgaaaacacatcctactcttttagaaaatctagttttctttgttgagactatttctgttatcctttgggtatccagttactgtgagagtgtcctacgaccatacaaactaaatttacagaaaaagaaaaagaagaaaaaagaaaccagcatcatcatgccacctgtctttaccagtttccaagactatgttactgggcttcagactttaatttccaatgttgtggatcatattaaagggcttgaaacacatctaattgcacttaaacttgaagaacttattttagaagacacttctctctcaccggaagagagaaaattttcaaagactgtgcaagggaaggtgcagagcagttatctgcactcacttctggaaatgggggagctgctgaaaaaaagacttgagaccacaaagaaactaaaaatttaaggaagtatctatcatgggcactgatgactctgcaacagaatatgacaccatcttcccaggcaaaagcaacatctggttgaccatgattttaatccagaacttcctcataaaatgcatgaaggactttgatcgtgaatttttttaggtgttaaatatatacaactgattaaattattgtatataaaccagaagcgggaccctcatctgggtttgaccactttttatacatgttcatatgcatatggcagcaacaagagaaccctacttttcttcttcccatcaccagaaacatcttttcaggggagcggggggtctataaaaacagcaatagaaattaagcataaagcatcaacctcatagcaactgaatagcccttccattataaataacattgagagtttttggtctggtccttgagccacaagaagtggaggggagaccatgcctgggaacagacccccttttcacagcagtaagtttgttttgaggctttctcagctacttggctcccacagaacccaaggcaggtacacaaaggaccttagatgagatctggcatatgcacccgcaatagaagggcaccacttggatgaccacaggcacttagtttttggctagtttttgtctgatagttaagacatccccatcctagcttctgtgagagttaaaaatctcaggtaagaaggcaaggaaggctctgttaatttatagctgtttagaggggaaagcagtgcagaccacttattaagcccgctgaggactagctttctgtctttcatacatttgggaaagataggaatgactgtttcaaagaagagaggtgcacataatttatgcaggcaagtatgatacttatttcattggttttgtgagtcatatatatacatatatatatatacacatatatatatgacttgaaaattaagatttaatactttaatgttttaagtgtggggggtttgggaaggaaggaatgtaatattatggatttagccttaggctttaagttttaggctggcaaaagaaatgttattcagtgggtttgaggtttggactactttcttcaaacttagagaattataacaggatggtgtttactttgttcacctggatgtccccaagactctagcttcttctatcagtggttggtctgatagaagaggtaaaaattgctcttgaaaatgtcctacaatttatgcagtttctttgataatatttttctgtttaaatccctgcttctgtttttggtctgttacctaaatatagttcaagtttaattctgtaagagcaaagaaatgaatttgatgaggaaattaagcatccaatggaggattggtcttgaagaccttaaaggtgctttccaacctgcactgctccagtgaaatgtggtacttttttcttttaaaagcaaccaagagagctgggaatatctgtgtacgcaaagtaattgcattttgtcccttcattttgactttcttagattcataatttgatacagtgcttaaacttccaaggaaattttaaacaattactacattacctgttcaaaataaggcttgttggaaatcctagtccatcaactaatttcaaaaatttatttttgatatgagtagcaacagctggtcatataccctatcccaaaaggaagaactgtcttgaacaagatgaatggaaaattgtggttaattctgaatttcatgtaatgacaacatattctttcataaaactatggcctgtttaagatggacttttgtgtgtgtctgctggggagggtggggtacatgtgtatggcgtgtgttcttgaaatgatgtctctctgaatatccaaaaaagtactgtactgtagaaatgctctttgaaaaagtctatcgactgaccatgatcaatctagcatatgtatgttcagtgggctagccttggtcctcagggacagtgtgtgactctagtggtcttcctaaccagtctcttgcctaaagatatctgggacctctactggctttaatgacaaataatgttatgttgaggttatgcttcctttgttatttgctgattttcctactaaatgtagcatttcaattagatccagctttcacattttgagataattgtaaaaagaatgaaattatgcagaaatggccaatatctcttatcaatctgttcttttggaaaccctcatgtactataaattgtgtacagttaaaaaaatatatatatatatatattcttacatgagtaaaaagcaccctctcccagcaatcgtatgccattggtatttgaagagaattcccaaataaaaaaaaaaaaaa

SEQ ID NO: 614 - DNA, 647 bp, Homo sapiens
  CDS (165)..(302)
ggcgcaccacaaaacgctccgcgggctctggacaccctatcagctagtcccgtccctcctggtgtccgggctcgaccatccatcccgtgttttgggagtgcctttccttaccagattcttctaaagccctgatgcacccacccttaagtggaaggttttgaaacatgaatctttcgctcgtcctggctgccttttgcttgggaatagcctccgctgttccaaaatttgaccaaaatttggatacaaagtggtaccagtggaaggcaacacacagaagattatatggcgcggttggtaacatctgaaactgtccagagggactctggagagaatggtcctcgctgttgggagttgatagccagagagtagcttctagacaccagaccttaccaggcaataacctaacagcacccattataggtgcaatatgggcatatatctccattgtgtcttggcttggagaacagctcccagagaagtatcaacccatccctggccatggtttctcttccatttctgcccgcaaatcggcttggtgaacatgggttgggtaagtagacataaagtccaccagctatatgtttgcctctagaatgaagaaggatggaggagagcagtgtgggaaaagaatatgaaaatgattgaac

SEQ ID NO: 615 - DNA, 1701 bp, Homo sapiens
  CDS (24)..(1421)
tttgttattgataatagttcttcatgaaagcaacgcaacttgaacagatgaaggaagattattcatacattatggaaacgaaagaaagaacaaaggagcagatacatcaaggagaagagcggcttactgaactaaagcgccagtgtgtagagaaagaggaacgttttcaaagtattgctgggttaagtacaatgaagactaatttagagtccttgaaacatgaaatggcttgggcagtggtcaatgaaattgaaaaacaattgaatgccatcagagataatatcaaaattggagaagatcgtgctgctagacttgacaggaaaatggaagaacagcaggtcagacttaatgaggcagaacaaaagtacaaggatattcaagacaaactagaaaagattagtgaagagacaaatgcacgagcaccagaatgtatggcattgaaagcagatgttgttgctaagaaaagggcctataatgaagctgaggttttatataaccgatccttaaacgaatataaagcattaaagaaagatgatgagcagctttgtaaacgaattgaagagctgaaaaaaagtactgaccaatctttggaacctgaacggttggaaagacaaaaaaaaatatcttggttaaaagagagagtaaaggcctttcaaaatcaagaaaattcagtcaatcaagagatcgaacagtttcagcaagccatagaaaaggacaaagaagaacatggcaaaattaagagagaagaattagatgtgaagcatgcactgagctacaatcagaggcaactgaaagaattgaaagatagtaaaactgatcgactcaaaagatttggccctaatgttccagctcttcttgaagccatagatgatgcttatagacaaggacattttacctataaacctgtaggccctttaggagcttgcattcatcttcgggacccagaacttgctttggctattgaatcttgcttaaaagggcttctgcaggcctattgttgccataatcatgctgatgaaagggtccttcaggcactcatgaaaaggttttatttaccagggacctcacggccaccgataatagtttctgagtttcggaatgagatatatgatgtaagacacagagctgcttatcatccagactttccaacagttctgacagctttagaaatagataatgcggttgtggcaaatagcctaattgacatgagaggcatagagacagtgctactaatcaaaaataattctgtagctcgtgcagtaatgcagtcccaaaagccacccaaaaattgtagagaagcttttactgctgatggtgatcaagtttttgcaggacgttattattcatctgaaaatacaagacctaagttcctaagcagagatgtggattctgaaataagtgacttggagaatgaggtgaaataggaggcccgatattaaatttcaggaaattatctggctggaaagcattttaacaccggaggaactctaaaggggccagtcctttatagacctggagaagcaagagagggggcgataaatctcccggagccaaaatagcacacctatgacacgagcccactgaagaaaacatacacgcggcacacaacccgaacaacatatacagaaccatagggagagcaccacagacagaacatcgacacacagacctcgagccaacgtagcgtgagcgacaagcaaa

SEQ ID NO: 616 - DNA, 1830 bp, Homo sapiens
  CDS (337)..(696)
gcacgagtttagattagcagctttatgatgccgatgctgaaggaacttttcaccccattcttacaagtctgctactgttttaagtgacatccttatagttgtagataagcaaatgtaaggttatatcaatgtgaagaagcccttagtatcacattttaaaatttatcatttagcaatatgacttttaaatttattgtttccgaatgagtgttgttgaggaatgttagcagtagtaaaatcttgtgttacaagatttttgcatttacatgaactttcactcatttttcagaatttgttcctagagacagagaacccaatacaaaagtgagaacatgtatgcataatcagaaggatgcagtgcagatgcctagtgaaactctgaaagcaaaaatggtacctgagaaagttccccgcagatgtgctactgttgctgcaaataaaataaagataatgagtaatctaaaagaaacgatctcaggaccagaaaatgtctggattaggaagagtagcagaaaactgccccatcgaaatgcttctgctgcggctaagaaaaaattactgaatgtttataaagaggatgatacaaccataaattctgaaagtgaaaaagagctagaagatattaatagaaaaatgcttttttttaagggggttcagatcctggaaagaaaatgcacaatagtgactatgagaatgtagaagtggcatctgaaaacaattggtacacaagtaaactggcagttacattctgctcccagctctaaaattactcccttattggcatctttggaggaattttctaaaagccataatccagtgggttcctcccagtcagctcttgtacagacatgtgctctggggaattctgaggaggaaataaattgcagagtctgtaggtggagaggtggaaagaaaagacaaatggcctgctataagactactattcctttccagaatgcaaggccttgaagacatgattccttagaggaagaatataatgggaagtgtacaggctaggaagaacttgaagtgaacaaatttcaaaatcttaacctgatgctaatttttcagggttctccattacagtgtaaaaattcagaccacgacaactatggtgtcatgaggaaaaaaaatcaggcatttttccaaaggaagtgctaatgggcctatttgacttctgagtgaagcaaaaactacccagatccattccctataattcacatccccaaaggtcaaaaacaaactaggaggacctgggaatttcagctggagatactgattattgagttctgaagtagagtgttggaaataggcaattagagaaagtccattgatgtcattttgtttataatattgcagttcatactgaatgaccacttgatatgactaattcagggaatatatatttttctatgaaagctatgaatgttactatcacggcttttccttatttttacttgtatgtagcagcatttacagaaatgccaaaaatgtgcctcattaagaggcaggtcttaatcagttagataaaaataaaatgtatagcttaagatcaaaacagtcatatttttagatacagtgaaatcttttatgtttctctacagcaccttaaaaattagaacttgaatactttgagtaaacttactacaatctcatcccaacaaactttaatggtagcatgtttggcctatttcattgtggcctgtactaggattagaaaatttggtcgtggtataacaaagaagtgtatttacaataggatttaatttgttgttaatatgtatttgttgaaattaaaattgccagattaaatgaaaaaaaaaaaaaaaa

SEQ ID NO: 617 - DNA, 2322 bp, Homo sapiens
  CDS (170)..(751)
gtgtatctcatgcgagtctgcgaactgaagccgctggtgctatgcaagcgtctgtggctcgaatggcctagcccggcggaagcctgacccgccccatgctcagtggtgtggttcgcgccaagccccgtgccctggacccagctggacaggtgtctccaagaagcagctcatgtggcttctgaaccgactacaaggcctgcaggagctggtgctctctggctgctcctggctctctgtctctgccctgggctcagccccactgccagccctgcggctcctggacctccgctggatcgaggatgttaaagactcccagctccgggagttgctgctgcctccaccagacaccaaaccagggcaaacagagagccgtggtcggctgcagggggtggcagaactgcgtctggcaggtttggagctgacagatgcctccctgcgtctcctgctgcgtcacgcaccccagctgagcgccctggacctgagccactgcgcccacgtcggggaccccagtgttcacctcctcacggcccccacgtccccactccgcgagaccctggtgcacctcaatcttgctggttgccaccgcctaacggaccactgcctcccgctgttccgccgctgccctcgtctacgccgcctagacctgcgctcctgccgccagctctcacccgaagcttgtgcccggctggcagctgccgggccccctggccccttccgctgccctgaggagaagctgcttctcaaggacagctagttgggcgccccccaccctcccccggactcgacaggagcctggacctccggcttcatttcacccctgctgggaggccaggttcccacctcaccaccctgggattcctgagtgtcagtgacttgggattcccacccagggactcaagccagccacccccttctttcccccctgcactgatatctctgggggtttctccttcctatgtcctgcccctgctacctgcttcattgtccatcccctgggggagtgggtcagaggtactggagggtgctgagccgaagggacggtgggaggggggttatggtgcaagtgttgggggggagaatggggaaaggacacacacaggatatgggagccaggggctgggggaggtggaaggggcggggggcggggcagacagcagaccaccaagggttcagggaacaaagaccagttacttggagtggggggtgggggtggggccacaaaaggaaaaccggaggagcaattggggatccaggtgtcagaggtaggggaaccaggggcaagctggggctgagctggaggtggggatgagagcaggtgtggggacagcaatacccccttgggggtcacctctctgcttcccccctccccaggcttcagttccttccccttgaccctgactccttgaacgtcactgaaaacggcagctattgcaaggagtgggggccgcgggcagccgctcttcagctcgcggcccaggggagtggcgaggggcgccccaaccccctgcccgcctctccgcacaatacttgaacattcatctgtactgaagtgttacttgaaccgggggaatctcggacctgggggagccggggtgtgaggggactggaccagcttggactgagacctgagaccgggccggtgggcgcccatttgggactgcgccacccccaggcttgttcttgttttactgtattgagcggcggcacccgccggacccgcattatggctgggggcgccagcccaagaatggggaccatgggactcctccagcctggctcttcccactctttcatcgtcatggaaacttgtatcccatttgcccagggaactgccactcctggttgccatggaaatagcagccaacggacacctcccgatgccagtgctaaggctggaaatggccccctcttagttgccatgggaacctagtaacagactctgctggccctccttccctgccccttcctcgagcgcggggtggggcttcgggaccccggggatgagccgggccaggtcccgcccctccgcgcaggcctccggggggccggggcttaccatgtaggggaggggagatctatccacatacctcaggtaacagggaggtgcgcgggtggggggagggctgggcggaccaaaggccggaggggtggggcctggggatagcgagaggcttgagaatggggccgcttgggggagggaagaggcagcccggcgaggggcaagcgggggacccagccgggctgggcccctgggccccgggtctgtacaatacggtttgctataaaactcaaaatcttccagccgggaaaaaaaaaaaaaaa

SEQ ID NO: 618 - DNA, 1525 bp, Homo sapiens
  CDS (317)..(1264)
cggacgcgtgggcggtttcgtgggctttacttggcccgcgcttagggccctcgcggggggcttgtgggtcctcctccccctcccactgacaactgccccaactgctcttcccgccccggtcacagtgaaaatgtagacggggtcgttgtccgtacgactgtgcgccagggctcggggaggggcgccctccgcgtgagcgcccccctgggaatattgaacataatcacctctcattccagactatgttaggtcttaatggtgggaggacgcccgagtgctcggcccgtttcaccccgaggaggaaggacactgggtcatgacgccatcagagggcgccagagcagggaccggacgcgagttggagatgttggactcgctgttggccttgggcggcctggtgctgcttcgggattccgtggagtgggaggggcgcagtctcttgaaggcgcttgtcaagaaatctgcactgtgtggggagcaagtgcatatcctgggctgtgaagtgagcgaggaagagtttcgtgaaggttttgactctgatatcaacaatcggctggtttaccatgacttcttcagagaccctctcaactggtcaaaaactgaggaggcctttcctggggggccgctgggagccttgagagccatgtgcaagaggacagatcctgttcctgtcaccattgctctcgattcactcagctggctgctacttcgccttccctgcaccacactctgccaggtcctgcatgctgtgagccatcaggactcttgtcctggtgacagctcctcagtggggaaagtgagtgtgctgggcttgctacatgaagagcttcatggaccaggccctgtgggagctctcagcagccttgctcagactgaggtgaccctgggcggtaccatgggccaggcctcggcccacatcctgtgtcggaggccccgacagcgcccaactgaccagactcagtggttctccatccttccggacttcagcctggatctccaagaggggccctctgtagagtcccagccctactccgatcctcatatacccccggtggatcccacaactcatttgacctttaaccttcacctgtccaagaaagagagagaagccagagatagcctgatcctgcccttccagttcagttctgaaaaacagcaggctctcctgcggcctaggccagggcaggctaccagccacatcttctatgagccagatgcttatgatgacctggaccaagaagacccagatgacgacctggatatttgactggccagatttgattagattgtaattggagggggcgcgggaagactttgggcccagaaccatctttctattgtttgtgttagccttaccctgtccctgccccaccttggttccccttgtctatggagccccgccttgtgagccaggaagcagcgtctcatcaggacagaaggtaggatgaagacatggggtaatgtgagagagtagaacacccccgtacctaataaaaatctttatttttttattaaaaaaaaaaaa

SEQ ID NO: 619 - DNA, 1825 bp, Homo sapiens
  CDS (162)..(887)
tccacccgagccccctcccccgggccgttcccgagttctaagttggcgggagcctataaaagctggtgccggcgcgacccgcggacacacagtgcaggcgcccaagccgccgccgccagatcggtgccgattcctgccctgccccgaccgccagcgcgaccatgtcccatcactgggggtacggcaaacacaacggacctgagcactggcataaggacttccccattgccaagggagagcgccagtcccctgttgacatcgacactcatacagccaagtatgacccttccctgaagcccctgtctgtttcctatgatcaagcaacttccctgaggatcctcaacaatggtcatgctttcaacgtggagtttgatgactctcaggacaaagcagtgctcaagggaggacccctggatggcacttacagattgattcagtttcactttcactggggttcacttgatggacaaggttcagagcatactgtggataaaaagaaatatgctgcagaacttcacttggttcactggaacaccaaatatggggattttgggaaagctgtgcagcaacctgatggactggccgttctaggtatttttttgaaggttggcagcgctaaaccgggccttcagaaagttgttgatgtgctggattccattcctgaatccctggattactggacctacccaggctcactgaccacccctcctcttctggaatgtgtgacctggattgtgctcaaggaacccatcagcgtcagcagcgagcaggtgttgaaattccgtaaacttaacttcaatggggagggtgaacccgaagaactgatggtggacaactggcgcccagctcagccactgaagaacaggcaaatcaaagcttccttcaaataagatggtcccatagtctgtatccaaataatgaatcttcgggtgtttccctttagctaagcacagatctaccttggtgatttggaccctggttgctttgtgtctagttttctagacccttcatctcttacttgatagacttactaataaaatgtgaagactagaccaattgtcatgcttgacacaactgctgtggctggttggtgctttgtttatggtagtagtttttctgtaacacagaatataggataagaaataagaataaagtaccttgactttgttcacagcatgtagggtgatgagcactcacaattgttgactaaaatgctgcttttaaaacataggaaagtagaatggttgagtgcaaatccatagcacaagataaattgagctagttaaggcaaatcaggtaaaatagtcatgattctatgtaatgtaaaccagaaaaaataaatgttcatgatttcaagatgttatattaaagaaaaactttaaaaattattatatatttatagcaaagttatcttaaatatgaattctgttgtaatttaatgacttttgaattacagagatataaatgaagtattatctgtaaaaattgttataattagagttgtgatacagagtatatttccattcagacaatatatcataacttaataaatattgtattttagatatattctctaataaaattcagaattctaaaaaaaaaaagcaaactataacaagcaaaaaggcagacactgaagctcacaaactccaactaacatatgccttcttagttggcagacatgcttgcaaaactcctgatggctttgatatttaaaaaaaaccctagagaggggtttgtttacctccggtcaaattttgcacgtcacagacaccggattttggcacatggctaccccccgggggaccggcaacatgttgtagat

SEQ ID NO: 620 - DNA, 2728 bp, Homo sapiens
  CDS (119)..(2263)
tttcgtaaggaagtgagaggtcggctgggggttctcatagtgagaggggagcagaggatcctcccgtgcaggctgtggatgtcactcacttcccagctggtgaagcctcgctgcagagatgcatctgctcccagccctggcaggggtcctggccacactcgtcctcgcccagccctgtgagggcactgacccagcctcccctggggcagtggagacctcggtcctgcgagactgcatagcagaggccaagttgctggtggatgctgcctacaattggacccagaagagcatcaagcagcggcttcgcagcggttcagccagccccatggacctcctgtcctacttcaaacaaccggtagcagccaccaggacagttgttcgggccgcagattatatgcatgtggctttggggctgcttgaagagaagttacaaccccagcggtccggacccttcaatgtcactgatgtgctaacagaaccacagctgcggctgctgtcccaggccagtggctgtgctctccgggaccaggccgagcgctgcagcgacaagtaccgcaccatcactggacggtgcaacaacaagaggagacccttgctaggggcctccaaccaggctctggctcgctggctgcccgccgagtatgaggatgggctgtcgctccccttcggctggacccccagcaggaggcgcaatggcttccttctccctcttgtccgggctgtctccaaccagattgtgcgcttccccaatgagagactgacctccgaccgtggccgagccctcatgttcatgcagtggggccagttcattgaccatgacctggacttctccccggagtccccggccagagtggccttcactgcaggcgttgactgtgagaggacctgcgcccagctgcccccctgctttcccatcaagatcccacccaatgacccccgcatcaagaaccagcgtgactgcatccctttcttccgctcggcaccctcatgcccccaaaacaagaacagagtccgcaaccagatcaacgcgctcacctcctttgtggacgccagcatggtgtatggcagtgaggtctccctctcgctgcggctccgcaaccggaccaactacctggggctgctggccatcaaccagcgctttcaagacaacggccgggccctgctgcccttcgacaacctgcacgatgacccctgtctcctcaccaaccgctcggcgcgcatcccctgcttcctggcaggtgacacccgatcaacggaaacccccaaactggcagccatgcacaccctctttatgcgagagcacaaccggctggccaccgagctgagacgcctgaatccccggtggaatggagacaaactgtacaatgaggctcggaagatcatgggggccatggtccagatcatcacctaccgagactttctgcccctggttctgggcaaggcccgggccaggagaaccctggggcactacagggggtactgctccaatgtggacccacgggtggccaatgtcttcaccctggccttccgctttggccacacaatgctccagcccttcatgttccgcttggacagtcagtaccgggcctccgcacccaactcgcatgtcccacttagctctgccttctttgccagctggcggatcgtgtatgaagggggcatcgaccccatcctccggggcctcatggccacccctgccaagctgaaccgtcaggatgccatgttagtggatgagctccgggaccggctgtttcggcaagtgaggaggattgggctggacctggcagctctcaacatgcaacgaagccgggaccacggccttccagggtacaatgcttggaggcgcttctgtgggctctcccagccccggaatttggcacagcttagccgggtgctgaaaaaccaggacttggcaaggaagttcctgaatttgtatggaacacctgacaacattgacatctggattggggccatcgctgagcctcttttgccgggggctcgagtggggcctcttctggcttgtctgttcgagaaccagttcagaagagcccgagacggagacaggttctggtggcagaaacgaggtgttttcaccaaaagacagcgcaaggccctgagcagaatttccttgtctcgaattatatgtgacaataccggtatcaccacggtttcaagggacatcttcagagccaacatctaccctcggggctttgtgaactgcagccgtatccccaggttgaacctatcagcctggcgagggacatgaggcttctgcaggagtctatcccaagtctccaacttttggagacaaggggaaggggaggaccatgaggctgccttgtctccctggagcaagtgcaggctgctgacgcttctgctggctacagctcagagctgggttccccagccaggagtgaaggctgggggctcctatcagcaatggaccttcccgccttgggagcctcttaggtattaggctatgaatcagcgccacgtgcaaaggcttgggagccaagccatgtggtcttgcaccccaggcaagaaaagtcagctggagggtttacagcactttctactgtttcccagccctccctcccctccctcaccatgactaagagaccactcggtcctagcctccagacaccccacaatactcctctgagcctgaggccaggcagcatgctctgcttctaccaataaagcactgctaagggcaaaaaaaaaaaaa

SEQ ID NO: 621 - DNA, 1628 bp, Homo sapiens
  CDS (79)..(1467)
tcccgaattcccgggtcgacgatttcgtgggtcaagtggcttcttctgagcgctgagggaggggagcgtgcgtaggggatggtgccagcgctgcgttatttggttggtgcctgcggacgggcccgcgggcttttcgccggtggctcccctggggcgtgcgggttcgcgtctgggaggccaagaccgctgtgtggaggtagccgcagcgccagcaccagctcatttgatatagtcattgttggtggcggaattgtggggcttgcctctgccagagcactcatcctgcgacatccatcactttctattggtgttctggaaaaggagaaagatttagctgttcaccagactggacataacagtggtgtcatacatagtggaatttattataaacctgagtctctgaaagccaaattatgtgtacaaggtgcagccctcctctatgagtactgtcagcaaaagggaatttcctacaagcagtgtggcaagcttatagtagctgttgaacaagaagaaattcccagacttcaggccctatatgagaaaggcctccagaatggtgtcccgggcctgaggctgatccagcaggaggatataaaaaagaaggagccatattgtaggggtctaatggctattgattgtccacatactggcattgtggactatcggcaggtggctttgtcatttgcccaggatttccaagaagcaggtggctctgtcttgaccaattttgaagtaaaaggtattgaaatggctaaagaaagtccttcaagaagtatagatggaatgcaatatccaattgttataaagaatacaaagggagaggaaattcgatgtcagtatgttgtgacatgtgcaggactttactcagaccgtatttcagagttgagtggctgcactcctgatcctcgaattgtaccattccggggagattacctgcttttgaagccagaaaaatgttatcttgtaaaaggaaatatttatccggtcccagatagccggtttcctttcctaggagttcacttcacaccaaggatggatggcagtatttggctagggcctaatgcagttcttgcctttaaacgagagggttacagaccctttgacttcagtgccacagatgttatggatataattatcaatagtggcttgattaaactggcatcccagaatttttcctatggagttactgaaatgtataaagcatgttttcttggtgcaacagtgaagtatcttcaaaaattcatccctgaaattactatcagtgatatacttaggggcccagctggagtaagagcccaggccctggatagagatggaaatctggtagaagattttgtatttgatgcaggagttggggatattggaaatcgcattcttcatgtgagaaatgcaccttctcctgctgctacttcttccattgcaatttctggaatgattgcagatgaagtacaacaaagatttgaattataaataatgaaaggagctaggtatgcactgtaatcttcatgtcagcaacaagaatgtactaattgcattctttaatttaaaaaatggtttttaaactttcgtttttaggtcaaagataaccactgcattgttaaaatgatgtaacatagaaataataattt

SEQ ID NO: 622 - DNA, 1762 bp, Homo sapiens
  CDS (131)..(1582)
aaggatccttaattaaattaatcccccccccccgagctctgggcacctccagctcctgctcgccggacggctcccagggagagcagacgcgccagacgcgccaccctcggggcgccgacggtcacggagcatggggtcggcctttgagcgggtagtccggagagtggtccaggagctggaccatggtggggagttcatccctgtgaccagcctgcagagctccactggcttccagccctactgcctggtggttaggaagccctcaagctcatggttctggaaaccccgttataagtgtgtcaacctgtctatcaaggacatcctggagccggatgccgcggaaccagacgtgcagcgtggcaggagcttccacttctacgatgccatggatgggcagatacagggcagcgtggagctggcagccccaggacaggcaaagatcgcaggcggggccgcggtgtctgacagctccagcacctcaatgaatgtgtactcgctgagtgtggaccctaacacctggcagactctgctccatgagaggcacctgcggcagccagaacacaaagtcctgcagcagctgcgcagccgcggggacaacgtgtacgtggtgactgaggtgctgcagacacagaaggaggtggaagtcacgcgcacccacaagcgggagggctcgggccggttttccctgcccggagccacgtgcttgcagggtgagggccagggccatctgagccagaagaagacggtcaccatcccctcaggcagcaccctcgcattccgggtggcccagctggttattgactctgacttggacgtccttctcttcccggataagaagcagaggaccttccagccacccgcgacaggccacaagcgttccacgagcgaaggcgcctggccacagctgccctctggcctctccatgatgaggtgcctccacaacttcctgacagatggggtccctgcggagggggcgttcactgaagacttccagggcctacgggcagaggtggagaccatctccaaggaactggagcttttggacagagagctgtgccagctgctgctggagggcctggagggggtgctgcgggaccagctggccctgcgagccttggaggaggcgctggagcagggccagagccttgggccggtggagcccctggacggtccagcaggtgctgtcctggagtgcctggtgttgtcctccggaatgctggtgccggaactcgctatccctgttgtctacctgctgggggcactgaccatgctgagtgaaacgcagcacaagctgctggcggagggcctggagtcgcagaccctgttggggccgctcgagctggtgggcagcctcttggagcagagtgccccgtggcaggagcgcagcaccatgtccctgccccccgggctcctggggaacagctggggcgaaggagcaccggcctgggtcttgctggacgagtgtggcctagagctgggggaggacactccccacgtgtgctgggagccgcaggcccagggccgcatgtgtgcactctacgcctccctggcactgctatcaggactgagccaggagccccactagcctgtgcccgggcatggcctggcagctctccagcagggcagagtgtttgcccaccagctgctagccctaggaaggccaggagcccagtagccatgtggccagtctaccatggggcccaggagttggggaaacacaataaaggtggcatacgaaggaaaaaaaaaaaaaaaaaaaaaa

SEQ ID NO: 623 - DNA, 1238 bp, Homo sapiens
  CDS (106)..(813)
gggacctcaccacctgtctcctccctgaggtcttagaacagatacaagaaattccaggcgaaggtcccacagagtttggatcacgatgaggccagtgagtcggagatgagaaagacctcaaactcctgcatcatggaaaatgggcaccagccggggacagagaagaattcctctttcacgtggtctgtgccaagctctggctacggggcagtgacagcaagcaaacacagcaatagcccaccgctggtgacaccaccccagtcgcccgtgtccccgcagccgccagccataactcaggtccatcggcagggggagcgtcgcagggagctggtgaggtcgcagacgctgccccgcacctcggaggcgcaggcccggaaagcattgtttgagaagtgggagcaggaaacggcggccggcaaggggaaaggcgaggcccgggccaggctgaagcggtcgcagagcttcggcgtggccagcgccagcagcatcaagcagatcctgctcgagtggtgccgcagcaagacgctgggctaccagcacgtggacctgcagaacttctcctccagctggagcgacggcatggccttctgcgccctggtacactccttcttccccgatgcctttgactacaactccctgagccccacgcagaggcagaagaacttcgagctggctttcaccatggccgagaatctggccaactgtgagcgcctcatcgaagtggaggacatgatggtgatgggccgcaagccggaccccatgtgtgtcttcacctacgtccagtcgctgtacaaccacctgcgtcgcttcgagtaaagcccctgagcctggattgccaaagagcagccccaggaagaggccgggggtccgcttgcgattccccagccaggatgcccccaggagccttgccgtttggtgtgagcgcgctgtttgttctgtggcatgtgacggcactccccttcgagcccagctgtgttactgattaaaagtactgctgagctgtggtccgacagcactgatcacagccaagggcttggaggaaaaggaaaaattatgagagagagagagcccttggtgctaagtaatgatcttcctaaagaaatgcttgtgtttatagcttccagaatgctaatctacaattttccctctggtgaattcgatacatcggctttacagggttacagtgattaccaagtgttttttttttatcaaaatacccagagttttttacttcctca

SEQ ID NO: 624 - DNA, 730 bp, Homo sapiens
  CDS (1)..(660)
atggcctccgcgggcagcaccgctcggcgggcgggctccggaagctggcactcagaaaggggagaagggagaggtgctcggccgcagccaactccaagtggctccatgcagcaggcgaacaaagtctccttgaaggccacctggactgacgcggagtccaagcagcccaggtgggtagcgggagaaggtgtcccggctgcggggagcgagaacccggcccagcgcctccctggtgggcagggcctggagcgggcgggggcggaggctgcggcccgagaagcccgcagagacaggctggggccagggatcgcctcccgagaggtgcctaggccgtggcccagagtcgcttccccactgccccgcccaccagccaggcgggggccagggatcgcctcccgagaggtgcccgggccgtggcccagagtcgcttccccactgccccgccctccagccagcccctgcccgacctcgcagaccacctcagtgcgcaggcgactgccctcgccaggccgcgccgccctgcctcgctcaccccgccccgcgctgaccccagccccagcaaggagtccgaccagacggcaatcgaccagacggcgatcgggagctactaccagctgttcgcagcggctgtgggcaacgtggaatggctgcgattctgtctgaaccagagcctcagggaaatccccaccgacgacaagggcttcactgccatccacttcgccgcccaatg

SEQ ID NO: 625 - DNA, 1548 bp, Homo sapiens
  CDS (123)..(1382)
tttcgtctctgccgcggcttcctcggctgccagctctccggcgagccggagtcctagtgccgtaccgtcagtccccggccgcgcggagccgggatgcactgttcctgctgtgggtcctcatcatggagaccaaacgggtggagattcccggcagcgtcctggacgatctctgcagccgatttattttgcatattcccagcgaggaaagagacaatgcaatccgagtgtgttttcagattgaacttgcccattggttttacttggatttctacatgcagaacacaccaggattacctcagtgtgggataagagactttgctaaagctgtcttcagtcattgtccgtttttgctgcctcaaggtgaagatgtggaaaaagttttggatgaatggaaggaatataaaatgggagtaccaacatatggtgcaattattcttgatgagacacttgaaaatgtactactagttcaggggtacctagcaaaatcaggctggggatttccaaaaggaaaagtaaataaagaagaagctcctcatgattgtgctgctagagaggtctttgaagaaactggttttgatatcaaagactatatttgtaaggatgattacattgaacttcgaatcaatgaccagcttgctcgtttgtacatcattccaggaattccaaaagacacaaaatttaacccaaaaactagaagagaaattcggaacattgagtggttctctattgagaaattgccttgtcatagaaatgatatgacccccaaatccaaacttggtttggcacctaacaaattttttatggccattccctttatcagaccattaagggactggctttctcgaagatttggcgattcctcagacagtgacaatggattttcctcaactggtagcacgccggctaaacccactgtggaaaaattgagtcgaaccaaattccgccacagtcagcagttatttcctgacggttctcctggtgaccagtgggtaaagcacaggcaaccactgcagcaaaagccatataataatcattctgaaatgtctgaccttttaaaaggaaagaatcaaagtatgaggggaaatggcagaaaacagtatcaagattcacctaatcaaaagaaaagaacaaatgggcttcagccagcaaagcagcagaattctttgatgaagtgtgaaaagaaacttcatccacggaaacttcaggataattttgaaacagatgctgtatatgacttgcctagctccagtgaagaccagttgctagaacatgccgagggacagcccgtggcatgtaatggacattgcaagttccccttttcatccagagcctttttgagtttcaagtttgaccataatgctataatgaaaatcttggacctttgatagcagcacatgtattgtaaatgtcccaggatcagagacctgttgaattcgaggcattttaatgcttggagaaagactataagtgaatctacttcaagggattctgttcatggtggtatacagttcttggtgctcttttggaaattgtcaaacatttactgat

SEQ ID NO: 626 - DNA, 2394 bp, Homo sapiens
  CDS (235)..(1965)
tttcgtcggccccctatcccataccagttgcctgttagcccaacttcactatgctttctctctggtgctcctggcccagagcacaagcccagtgcagggagggagggtaactgctgacttcacgtctctgcccctccccaggaggagttcaacgtgtcctgcctgacagacagcaatgccgatacctactgggagagcgatgggtcccagtgccaacactgggtacggcttactatgaagaagggcaccattgtcaagaagctgctactcacagtggataccacagatgacaactttatgccaaagcgggtggtggtctatgggggtgaaggggacaacctgaagaagctgagtgacgtgagcattgacgagaccctcatcggggatgtctgtgtcctggaggacatgaccgtccacctcccgatcatcgagatccgcatcgtggagtgccgagatgatgggattgatgttcgtctccgaggggtcaagatcaagtcatctagacagcgggaactagggttgaatgcagacctgttccagccaactagtctggtgcgatatccacgcctagaaggcaccgaccctgaagtactgtaccgcagagctgtcctcctgcagagattcatcaagatcctcgatagtgtcctgcaccacctggtacctgcctgggaccacacactgggcaccttcagtgagattaagcaagtgaagcagttcctactgctgtcccgccagcggccaggcctggtggctcagtgcctgcgtgactctgagagcagcaagcccagcttcatgccacgcctatacatcagccgccgtcttgccatggaacaccgtgcctgcccctctcgagaccctgcctgcaagaatgcagtcttcacccaggtatatgaaggcctcaagccctctgacaaatatgaaaagcccctggactacaggtggcccatgcgctatgaccagtggtgggagtgtaaatttattgcagaaggcatcattgaccaagggggtggtttccgggacagcctggcagatatgtcagaagagctgtgccctagctcagcggatacccccgtgcccctgcccttctttgtacgcacagccaaccagggcaatggcactggtgaggctcgggacatgtatgtacccaacccctcctgccgagactttgccaagtatgaatggatcggacagctgatgggggctgcccttcggggtaaggagttcctggtcctggccctgcctggttttgtgtggaagcagctttctggtgaggaggtgagctggagcaaggacttcccagctgtggactctgtgctggtgaagctcctggaagtgatggaaggaatggacaaggagacgtttgagttcaagtttgggaaggaactaacattcaccactgtactgagtgaccaacaggtggtggagctgatccctgggggtgcaggcatcgtcgtgggatatggggaccgttctcgtttcatccaactggtccagaaggcacggctagaggagagcaaggagcaggtggcagctatgcaggcaggtctgctgaaggtggtaccacaggctgtgctggacttgctgacctggcaagagttggagaagaaagtgtgtggggatccagaggtcactgtggatgctctgcgcaagctcacccggtttgaggacttcgagccatctgactcgcgggtgcagtatttctgggaggcactgaacaacttcaccaacgaggaccggagccgcttcctgcgctttgtcacgggccgcagtcgcctgccagcacggatctacatctacccagacaagctgggctacgagaccacagacgcgctgcccgagtcttccacttgctccagcaccctcttcctgccacactatgccagtgccaaggtatgcgaggagaagctccgctatgcggcctacaactgcgtggccatcgacactgacatgagcccttgggaggagtgaggcgtgccgccggctgtgggaccagcaagactgcacgtgtccctcttggccttgcccagggcgaagacaccttccctgccctggtttggctgacgtgctcagcaaaaccccatgtgccctgctcctgtgtgcagttggggtaggggcagctggcatggtcaggtaacactagtggcccagccccgcagacccacaagccctacccgtgctggggcttgcttcccgaggtatttcacctcttaagagggaatcttccacaagcccagcacaagctgccaggcctgagctacttgaagggggccatctaggtccccaacccatggactttgcctccattttcagctccgccttttttctcctattttctctctggctttcttcagccatgactcacaactaaaaacataaaacactggagggtagtgg

SEQ ID NO: 627 - DNA, 1017 bp, Homo sapiens
  CDS (87)..(935)
  misc_feature (1)...(1017): n = a,t,c or g
gagggagncggggagatagggaaggaggatggcggggacggcgggaggaaggggagaggccgccgtgcggcgaaggcggggagaggatggagagcgctcggcggcggtggggcccggcctgcgggcccggggcggcggagaagaccccttccctgcgacgcgggagccgcgggagccactatgatgagagaagccacctgcatgacaccttcacccagatgacccatgccctgcaggagctggctgctgcccagggatcctttgaggttgccttccctgatgctgcggagaaaatgaagaaggtcattacacagcttaaagaagcccaggcttgcatccctccctgcggtctccaggagttcgcccggcgtttcctctgcagcgggtgctactctagggtctgcgacctcccgctggactgcccagttcaggatgtgacagtgactcggggcgaccaggctatgttttcttgcatcgtaaacttccagctgccaaaggaggagatcacctattcctggaagttcgcaggaggaggtctccggactcaggacttgtcctatttccgagatatgccgcgggccgaaggatacctggcgcggatccggccggctcagctcacgcaccgcgggacgttctcctgcgtgatcaagcaagaccagcgccccctggcccggctctacttctttcttaacgtgacgggcccgcccccgcgggcggagacagagttgcaggcctcgttccgggaagtgctgcgctgggcgccgcgggatgccgagctgatcgagccctggaggcccagcctgggcgagctgctggccaggcccgaggctctgacgcccagcaatctgttcctgcttgcagtcctcggggccctcgcatcagcgagtgcgacagtgttggcgtggatgttctttcgatggtactgcagtggcaactaacaaaggtatctttcctccttccctatcctatttccatcctgaaaataaagaatatatttcaactcaaaaaaaaaaaaaa

SEQ ID NO: 628 - DNA, 2467 bp, Homo sapiens
  CDS (51)..(2129)
caacttcttggggctcacccactctgcaggccacacattctttcctgacaatgtcccctaggcaaacccaagcttctttgatctcaccttctcggccggcctctactccccctgattcaccccctctgcaggcccctctttcccttcctgcctcaccccctctgcagacttctctctctcctgctgtctcacccctaagctcacccctgaccatacaccctctgcaggcgctatcttctctggcctcccactctcctcaggcacctctctcttccctgatcatgccccctctggagacccaatcttccctagccccaccctctctgcagacacctcctgcttccctgaccacaccccctctggagaacctaccttctctagccccgcctcctctgcagacagcttctgctcccctgaccacaccccatctggagactccaccttgtccagccccatgccctctgcaagcaccaccttcgccattgaccacgccccctccggagatgccctcttccatagccacgcctcctccacaggccccacctgctctggcctcaccccctttgcagggcctgccctctccccctctgtctcctttggccacgccccctccacaggccccacctgccctggccttgcctcctctgcaggcccctccctctccccctgcctcaccccctctgtctcctttggccacaccctctccacaggccccaaatgctctggcagtgcaccttctgcaggcccctttctctccccctccctcacccccagtgcaggcccctttctctccccctgcctcacccccagtgtctccttcggccacgcccccttcacaggccccaccctctctagccgcacctcctctgcaggtcccaccctctccccctgcctctcccccaatgtctccttcagccacgccccctccacaggccccaccccctctcgctgcgcctcctctgcaggtcccaccctctccccctgcctctcccccaatgtctccttcggccacgccccctccacgggtcccaccccttcttgccgctcctcctctgcaggtcccgccctctccccctgcctcactcccaatgtctcctttggctaagccccctccacaggccccacctgctctggccacacctcctctgcaggcccttccctctccgcctgcctcattccctgggcaggcccctttctcaccctctgcctcactcccaatgtctcctttggccacgcctcctccacaggccccacctgttctggcagcgccccttctgcaggtccctccctctccccctgcctcacccaccctgcaggccccacgccgccccccgaccccgggtccggatacctccgtctcgggcccacggctgaccctggcgttggcccccggcccgccgccgccgccctcgcgcagcccgtccagcacgctgagcggcccagacctggccggccacagcagcagcgccacgagcacgccagaggagctgcgtggctacgacagcgggcccgagggcggtgccgcagcctccccgccccccgacgcagagctcgccgcttgccacccggctgcctggagtcgaggccccgctccgccgccggctttccgcggagccccaggtgcgcccctgccgtggcctcccgctaccggaccgggctctgctgacggtctgtgcaccatctacgagactgaagggcccgagtcggcgacccccgcccctggcgcactggatccggggcccagtcccggcacgagcggtgggaaggcggcggctggggccggggccggggcgtcctcgcggagcccgaagcaggcgcgcctgggcgagctgccactgggggcgctgcaggcgagcgtcgtgcagcacctgctgagccggacgctgctgctggcggctgccgagggtgccgcgggcggcagcggcgggggcccaggaggtgcggagggtggtggcgtcacagggggcgcccgggctgcactcagcgacgccgaactcggccgctgggccgaactactgtctcccctggacgagtcccgtgccagcatcacctcggtcaccagcttctctccggacgacgtggcctccccgcagggtgactggaccgtggtggaggtggagaccttccactgagccagaccacagccccgcctgctacaccccacccctgccttaggatccgcccctccgggtacgccgtttgttttagaccccgcctccactgccctggagccccgctgggtggattagtcttagctccctagagcctgagcctttggcctcggaggctcgggacctacccacagctttgacctaggcccgcccctcgagctccgcccctttggcctaggacacgccccgtttccccgagtcccgccccgtgtgcagtgtattgcccaccccgcacagcctgagtttgcaataaaactgggacactgggacttgcaaaaaaaaaaaaaaaaaaaaaa

SEQ ID NO: 629 - DNA, 1352 bp, Homo sapiens
  CDS (222)..(1226)
tttcgtcgatgacctcgtttcctcagcggtagatagcgatggttaatattggctagcctgtagagttatcgggagaccaacgcacaaaaagggtttaataccgtgcccagcacataggcccgctcaccacgcagtatctgtggcaccgcttcagcgccgacctcggctacaatggcacccgccaaagggggggctgcagcaaccgcagcgcggaccccaccatgcaggaagtggagacccttacctcccactggaccctctacatgaacgtgggcggcttcctggtggggctcttctcgtccaccctgctgggagcttggagcgacagtgtgggccgccgcccgctgctagtgctggcctcgctgggcctgctgctccaggccctagtgtccgtttttgtggtgcagctgcagctccacgtcggctacttcgtgctgggtcgcatcctttgtgccctcctcggcgacttcggtggccttctggctgctagctttgcgtccgtggcagatgtcagctccagtcgcagccgcaccttccggatggccctgctggaagccagcatcggggtggctgggatgctggcaagcctcctcgggggccactggctccgggcccagggttatgccaaccccttctggctggccttggccttgctgatagccatgactctctatgcagctttctgctttggtgagaccttaaaggagccaaagtccacccggctcttcacgttccgtcaccaccgatccattgtccagctctatgtggctcccgccccagagaagtccaggaaacatttagccctctactcactggccatcttcgtggtgatcactgtgcactttggggcccaggacatcttaaccctttatgaactaagcacacccctctgctgggactccaaactaatcggctatggttctgcagctcagcatctcccctacctcaccagcctgctggccctgaagctcctgcagtactgcctggccgatgcctgggtagctgagatcggcctggccttcaacatcctggggatggtggtctttgcctttgccactatcacgcctctcatgttcacaggtaaagtgtgtgggctcagggacagcttgtcccagaggcactgggtaagaactgggggccggccactcactgcccccagatgtggttcattcctgtgtctttggaaacatagttatgcccccagcctgcactggagaacagacaactaagaaatccctcaaaaatgccatctttgatacatggaaaatatagaccttcagtagctaaagtaattaacccactgttatcaaccattaatattgttagtaatatagagcaaaagacaaaaaaaa

SEQ ID NO: 630 - DNA, 2334 bp, Homo sapiens
  CDS (46)..(1179)
aaatgcagctccagggttgcgaggcacccaccagcatcattccccatgcgaggtggcaaatgcaacatgctctccagtttggggtgtctacttctctgtggaagtattacactagccctgggaaatgcacagaaattgccaaaaggtaaaaggccaaacctcaaagtccacatcaataccacaagtgactccatcctcttgaagttcttgcgtccaagtccaaatgtaaagcttgaaggtcttctcctgggatatggcagcaatgtatcaccaaaccagtacttccctcttcccgctgaagggaaattcacagaagctatagttgatgcagagccgaaatatctgatagttgtgcgacctgctccacctccaagtcaaaagaagtcatgttcaggtaaaactcgttctcgcaaacctctgcagctggtggttggcactctgacaccgagctcagtcttcctgtcctggggtttcctcatcaacccacaccatgactggacattgccaagtcactgtcccaatgacagattttatacaattcgctatcgagaaaaggataaagaaaagaagtggatttttcaaatctgtccagccactgaaacaattgtggaaaacctaaagcccaacacagtttatgaatttggaatgaaagacaatgtggaaggtggaatttggagtaagattttcaatcacaagactgttgttggaagtaaaaaagtaaatgggaaaatccaaagtacctatgaccaagaccacacagtgccagcatatgtcccaaggaaactaatcccaataacaatcatcaagcaagtgattcagaatgttactcacaaggattcagctaaatccccagaaaaagctccactgggaggagtgatactagtccaccttattattccaggtcttaatgaaactactgtaaaacttcctgcatccctaatgtttgagatttcagatgcactcaagacacaattagctaagaatgaaaccttggcattacctgccgaatctaaaacaccagaggttgaaaaaatctcagcacgacccacaacagtgactcctgaaacagttccaagaagcactaaacccactacgtctagtgcattagatgtttcagaaacaacactgggtaattctaagaacttttttttttctaaaaaaacaaaagtaacaacgaaataactcccaggactcacagaaaagaaacctggtgccttaacttctctctccctccccactttctccttttccttccttcctggcagtggttaaccttcctctttcttggacagattccactgaagagttaaccacatggctgatcctggtgactgaacttctgggcaaatctggatgctaattgctaactaaatgccctttttaaccagtctctgggttatacagacagaataccagccttttaactcccaaatcttgggggagaatgaaggaaacctggaagtcttgactctgtgctttctgcttagagtggctttgggaagtcttgtgcatactaaatttgggaagaatccccaaaagtgtcatgcttttaaacaagaatttcatggcacccatgtttgttgtttcttagcccaagagaatctaacttgctttgttgttctctttcccctgaagaaaaggagcagcatgtgttttgttctgtaatttgatgttgatcttctcagccacaccactgccctttgaatgtacaccttcatattttaacagctatgtaacttttccagggaaggttatttccattaaaggtattggctgctctgtgtgcaagagtctgttacaaagcttgctgtgcatgatcatggttaagccacaacatcaaaacccaagtccaggagttgctaactgcactcttttttattgtagttctcagcaaaaggaccccggaaacattgcaaactattctaatacctcagtttgaattgccactgagcactctaggtaaaaaataataaatactgcagctttattattaccttggatattgtatgcatgcttcaaagaagtcttttgaattaattacgctaatttatacccaatcccttaaaggtgacacagtcttcaagtttaggatcccaaagaggctctccctatgacaaattgtttggttgggttgtttttcttttaagtggtcatattttaatattatgtttgattcttttaattcagaatcaatatgtcactgaacaaattgatcatttctgtattttttgtaaatgtgtttactctattgtctctcttaacagagaagatatatttatgatatttctgcagactgcttcttataattcttagaattcttctgagtgaagtatg

SEQ ID NO: 631 - DNA, 3136 bp, Homo sapiens
  CDS (260)..(2221)
attttgcaattgtgggttggctgaagaaaagaagacaacatgggaaaggaaaatctgggtgataaacggattaaacctttaggttaccgctgctctagataaacccatgatgtgactttttgtttttctcctaggtcagctgagggaacagctcagttaccttaagggtgataatttttttaggtttacttgttcggattgctcagcagatggcaaggagcagtatgaaaggctgaagctgacatggcagcaagtcgtcatgttggcaatgtacaacttgtctctggaaggaagtggacgtcaaggttatttcaggtggaaagaagatatctgtgcttttattgagaaacattggacttttttactagggaataggaaaaagacgtctacctggtggagcaccgtggcaggttgcctcagcgtgggaagtcccatgtacttccgttcaggtgctcaggaatttggagagccaggatggtggaaacttgttcataacaagcccccaacgatgaaacctgaaggagagaagttgtctgcctctactttgaaaataaaagcagcctcaaaaccaactttagatcccatcattactgttgagggacttagaaaacgagcaagtcggaatcctgtggaatctgccatggaattaaaagagaaaaggtctcgaactcaggaagcaaaagacattagaagagcccagaaggaggccgctggctttcttgacaggagcacatcttctacccctgtaaaattcataagccgaggccgcaggccagatgtgattctggaaaaaggcgaagtgattgacttttcctccttgagctcctctgaccgcaccccgctgacaagcccatctccttctccttctctggatttctctgcccctggtacacctgcctctcattctgccacacctagcttgctttcagaagcagatctgattccagatgtgatgcccccacaagccttgtttcatgatgacgatgagatggaaggcgatggagtcatagacccagggatggagtacgtcccaccccctgctgggtcagtagcttctgggccagtggttgggggcagaaagaaggtcagaggccctgaacagataaagcaggaggtagagagtgaggaggaaaaacccgacaggatggatattgacagtgaagacacagattcaaacacatctttgcaaacaagggctagagaaaagaggaagcctcagctggagaaggacacaaagccgaaagagcccaggtatactcccgtgagcatctacgaggaaaagctgctgctcaagaggctggaagcttgtcccggtgctgttgccatgactccggaagctcggagactgaaacgcaaactgattgtcagacaagcgaaaagggataggggattaccactttttgacttggatcaagttgttaatgctgctcttttgttagttgacgggatttatggagccaaagaaggaggaatttccagacttccagctggacaagccacgtacagaaccacctgtcaggacttcagaatccttgaccgataccagacttccttgccgtccaggaagggatttcgacaccagaccaccaagtttttgtatcgcttggtaggatcagaagatatggctgtggaccagagtattgtcagcccttatacctctcggatcttgaaaccttatatcaggcgtgattatgaaacaaagccacccaaactgcagctcctgtcacagattcgttcccacctgcacaggagcgaccctcactggacgccggagcccgacgcacctctcgattactgttatgtgcggccaaatcacatcccaacgatcaactccatgtgtcaggagtttttttggcctggcattgacctgtctgagtgtctgcagtacccagacttcagtgttgttgttctttataaaaaagtcatcattgcctttggcttcatggttcctgatgtgaaatacaatgaagcttacatttcatttctgttcgtccaccctgaatggagaagagcagggattgcaactttcatgatctatcatctgattcagacctgcatgggcaaggacgtaacccttcacgtctcagcaagcaaccccgctatgctactgtaccagaagtttggattcaagactgaagaatatgtattagatttctatgataaatattacccattggagagtacagagtgtaaacacgcattctttctgaggctccggcgctgatgcgaatacagctcacagagaaacgcatgtgctattggagaacaggtctttgtggagatctaaaggcagtgattgatttcacagggagctctaatctctgtgattacatggtccttcaaactcccaaccaaagtgagaaaagcggcatgcagtgaaatgagcagtgagcagccctttagcaaaatcgccctccagtccttcctggagatgccttcagccagcatcccagactccacagttatttatgaacgatgtcgtgattctccctccacctgacagtttgtaagagtgaaagagcatctaacctgatgctcttggagagagataacctgtctgtcataacttaaaggatgagaaaatgtggtgtagctattaaagattcatgcagtcccaaaaggcactgtcctgggatgatgagagattataaggtgatttcataaaaggaatccaaccctgtgcccggccattgatgtgttgtcattgaatccaggaggatttctagggcactgaagttttgttgtttcttttgctgactttggttacagtcagaaaaaataaactagatgtttgtgtctacatgttctacctgttgtacctattagcatcttcctgcagggacttgggcccatggcctgggaggttggtttgggattggggttgttgggcagcctgccattcacctggcctatcctggcccttctcatgcccaagacagttgtttcacaggagtggaagtgtgggtgatgcaagtagaaccctctagatgtaccctgtgtggtctgcaggactggactgtttgctgtgtttgtggatgttggcgatagactgtcagttaggttgtttgtgatccaacaagaacatttccaaaagtatctaggtgttctcaaataaaaagctttctttgcacaaccc

SEQ ID NO: 632 - DNA, 3200 bp, Homo sapiens
  CDS (1)..(2277)
atggatagtagcatccacctgagtagtctgatcagtcggcatgatgacgaagccacgagaacatcgacctcagaaggactggaggaaggtgaagtggagggagagacgctcctgatcgtcgaatccgaggatcaggcatcagtggacttatcgcacgaccagagtggggattccctcaacagtgatgaaggagacgtgtcttggatggaggagcagctgtcctacttctgtgacaagtgccaaaaatggataccagccagtcagctgagggaacagctcagttaccttaagggtgataatttttttaggtttacttgttcggattgctcagcagatggcaaggagcagtatgaaaggctgaagctgacatggcagcaagtcgtcatgttggcaatgtacaacttgtctctggaaggaagtggacgtcaaggttatttcaggtggaaagaagatatctgtgcttttattgagaaacattggacttttttactagggaataggaaaaagacgtctacctggtggagcaccgtggcaggttgcctcagcgtgggaagtcccatgtacttccgttcaggtgctcaggaatttggagagccaggatggtggaaacttgttcataacaagcccccaacgatgaaacctgaaggagagaagttgtctgcctctactttgaaaataaaagcctcaaaaccaactttagatcccatcattactgttgagggacttagaaaacgagcaagtcggaatcctgtggaatctgccatggaattaaaagagaaaaggtctcgaactcaggaagcaaaagacattagaagagcccagaaggaggccgctggctttcttgacaggagcacatcttctacccctgtaaaattcataagccgaggccgcaggccagatgtgattctggaaaaaggcgaagtgattgacttttcctccttgagctcctctgaccgcaccccgctgacaagcccatctccttctccttctctggatttctctgcccctggtacacctgcctctcattctgccacacctagcttgctttcagaagcagatctgattccagatgtgatgcccccacaagccttgtttcatgatgacgatgagatggaaggcgatggagtcatagacccagggatggagtacgtcccaccccctgctgggtcagtagcttctgggccagtggttgggggcagaaagaaggtcagaggccctgaacagataaagcaggaggtagagagtgaggaggaaaaacccgacaggatggatattgacagtgaagacacagattcaaacacatctttgcaaacaagggctagagaaaagaggaagcctcagctggagaaggacacaaagccgaaagagcccaggtatactcccgtgagcatctacgaggaaaagctgctgctcaagaggctggaagcttgtcccggtgctgttgccatgactccggaagctcggagactgaaacgcaaactgattgtcagacaagcgaaaagggataggggattaccactttttgacttggatcaagttgttaatgctgctcttttgttagttgacgggatttatggagccaaagaaggaggaatttccagacttccagctggacaagccacgtacagaaccacctgtcaggacttcagaatccttgaccgataccagacttccttgccgtccaggaagggatttcgacaccagaccaccaagtttttgtatcgcttggtaggatcagaagatatggctgtggaccagagtattgtcagcccttatacctctcggatcttgaaaccttatatcaggagcgaccctcactggacgccggagcccgacgcacctctcgattactgttatgtgcggccaaatcacatcccaacgatcaactccatgtgtcaggagtttttttggcctggcattgacctgtctgagtgtctgcagtacccagacttcagtgttgttgttctttataaaaaagtcatcattgcctttggcttcatggttcctgatgtgaaatacaatgaagcttacatttcatttctgttcgtccaccctgaatggagaagagcagggattgcaactttcatgatctatcatctgattcagacctgcatgggcaaggacgtaacccttcacgtctcagcaagcaaccccgctatgctactgtaccagaagtttggattcaagactgaagaatatgtattagatttctatgataaatattacccattggagagtacagagtgtaaacacgcattctttctgaggctccggcgctgatgcgaatacagctcacagagaaacgcatgtgctattggagaacaggtctttgtggagatctaaaggcagtgattgatttcacagggagctctaatctctgtgattacatggtccttcaaactcccaaccaaagtgagaaaagcggcatgcagtgaaatgagcagtgagcagccctttagcaaaatcgccctccagtccttcctggagatgccttcagccagcatcccagactccacagttatttatgaacgatgtcgtgattctccctccacctgacagtttgtaagagtgaaagagcatctaacctgatgctcttggagagagataacctgtctgtcataacttaaaggatgagaaaatgtggtgtagctattaaagattcatgcagtcccaaaaggcactgtcctgggatgatgagagattataaggtgatttcataaaaggaatccaaccctgtgcccggccattgatgtgttgtcattgaatccaggaggatttctagggcactgaagttttgttgtttcttttgctgactttggttacagtcagaaaaaataaactagatgtttgtgtctacatgttctacctgttgtacctattagcatcttcctgcagggacttgggcccatggcctgggaggttggtttgggattggggttgttgggcagcctgccattcacctggcctatcctggcccttctcatgcccaagacagttgtttcacaggagtggaagtgtgggtgatgcaagtagaaccctctagatgtaccctgtgtggtctgcaggactggactgtttgctgtgtttgtggatgttggcgatagactgtcaattaggttgtttgtgatccaacaagaacatttccaaaagtatctaggtgttctcaaataaaaagctttctttgcacaaaaaaaaaaaaa

SEQ ID NO: 633 - DNA, 1375 bp, Homo sapiens
  CDS (2)..(1219)
ttttgacccgcgctgcaggaattcggcacgagggaaggaactgctcctctcttctttgaagcccttcagcttcctggagaaggaggagcagctaaaggaagctgctcgacagagagacttggcagccacagctgaagccaagatctccaagcagaaggccaccagaaggattcccaagtccattctggagccagcccttggggataaactccaggaagctgagctcttcaggaaaattcgcatccaaatgagagccctggacatgctccagatggcctcttcccctatcgcctcctctagtaaccgggctaacccacagccccgcacagccacccgaacccagcaggaaaagcttgggtttctgcacactaacttcagattccagcctcgggtgaatcctgtggtccctgactatgagggcctttacaaggccttccagagaagagcagccaaaagaagagaaacccaagaggccactcgcaacaagcccttcttgctgaggaccgccaacctgcgccaccctcagcggccctgtgatgctgccaccaccggaaggaggcaggattccccacagccaccagctacacccctgccaaggagtcgttctctgagcggccttgcttccctctctgccaacactctccctgtgcacatcacagatgccaccaggaagagggaatctgcagtcagaagtgcacttgaaaaaaaaaaaaaagcagatgagagtattcagtggctggagatacacaaaaagaagtctcaagcaatgtccaaatctgtgaccttgcgtgcaaaagccatggatccccataaaagcctggaggaagtgttcaaagcaaagctgaaagagaaccggaacaatgaccgtaaaagagcgaaagaatataagaaagaactggaggaaatgaagcagcgaatacaaacaaggccctatctctttgaacaagttgccaaggatctagccaagaaagaagcagaacagtggtatctagacaccctgaagcaggctgggctggaggaagactttgtgagaaacaagggtcaaggcacccgggctgttcaagagaaagagaccaaaatcaaggattttcccaggttccaagaaactacaaaactcagcatcagagatccagagcagggtttagaaggatctctagaacagcctgcaagccccagatgcgtcttttttggtggtgacagagtaactatcacctgggcttaagaaatgaagatgttcttgttgtttcctaagactcctcggttcagttttactggtatggaatcctaagggtaaatcaatacactattttaaagggaaagattaaattcttaatctctaagaaaacaaattttgtataaaacaagaaaaaaaaaa

SEQ ID NO: 634 - DNA, 2584 bp, Homo sapiens
  CDS (44)..(631)
ttctgagatttgtagtccgtgtgcgggaattcattaaagcaagatggccgcgccctgcagattgtctcttgtatgcgtaagtttttttgaccgtcactcgtgtcagcttcaaagtcagatagatttttctcccagcatgttctacttccgaggctgtggccgttgggtcgcggtttccttcaccaagcagcaatttccgttggcacggttgagcagtgacagcgcggcgccccggactccgcacttcgacgtgatagtcattggtggaggacatgccgggactgaggcagccaccgccgccgctcggtgcggctctcggactctgctcctcactcaccgcgtggacacgatcggtcagatgtcatgtaatccttcctttggtggcatcggaaagggacatttaatgagggaagtagatgccttggatggcctgtgttctcgcatctgtgaccagtctggtgtacattataaagtattaaaccggcgtaagggaccagctgtgtggggtctgagagctcagattgataggaaactctataaacagaacatgcagaaagaaatctttgaatacaccactgcttactgttcaggagggagctgtagaagatcttattcttacagaaccagagcctgaacacactgggaaatgccgtgtcagtggggttgttttggtggatggaagcacagtatatgcagagagtgtgattctgactactgggacatttctgagaggcatgattgtaattggattggagacgcatccagcaggacgtttaggggatcagccttctataggattggctcagacactggagaagttagggtttgtggtgggaaggttgaagactgggactccaccccgaattgccaaagagtccattaatttcagtattctaaacaagcatataccggacaatccatccataccattcagctttaccaatgagacagtatggattaagccagaagatcagctgccatgttacttgactcacaccaaccctagagtggatgagattgtccttaagaaccttcaacttaatagtcatgttaaagaaacgacaagaggacctcgatactgtccctccattgaatcaaaagttttgcgttttccaaaccgtctacatcaggtttggttggaacctgaaggaatggattctgaccttatctacccacaggggttatctatgacgctaccagctgagttacaagagaaaatgatcacatgcatcagaggcttggagaaagctaaagtgattcagccaggctacggtgttcagtatgattacttagatccccgtcagatcaccccttccttggagactcatttggttcaacgactcttctttgctggacagatcaatggcaccactggttatgaggaagctgcagctcaaggtgtgatagccggaatcaacgccagtcttcgggtcagtcgcaagcctccctttgtggttagccgaacagaaggttacataggagtcttgattgatgacctcactactctgggcaccagtgaaccataccgcatgtttaccagccgagtagagttccgtttgtcactgcgccctgataatgctgacagccggctcacactgcgagggtataaagacgctggctgtgtgtcccaacaacgatatgaaagagcttgttggatgaagtcttctttagaagaaggcatttctgtgttgaaatctattgagtttttgagctctaaatggaaaaaattaatcccagaggcttctataagtactagtagaagtctgcctgtcagagctctcgatgttctgaagtatgaggaagttgacatggattcattagccaaggctgttccagagcccttgaagaagtatactaaatgtagagagctggctgaaagactgaaaatagaagccacttatgaatcagtgttgttccatcaactacaagaaataaagggagttcagcaagatgaagctctccaactgccaaaagacctagattatttgactatcagggatgtgtctttgtcccatgaagttcgagagaaactacattttagtcgtccacagacgatcggggctgctagtcgcatacccggagtaacacctgccgccatcatcaatctgctgagatttgtgaagaccactcaacgaagacagtcggctatgaatgaatcatccaagactgatcaatacttatgtgatgcagacagacttcaagagagagagttatagctttcaattcataaaagatttttaaagagcatataaataatttgatcaatacaacagtatagataaaagaattatttagcacatgttaaaatagctttattaggttactatgggtttgccattaatttctgagtgggacagaaattataattgtgctttttcgtgtatatgaaaaaactagtcgtaaacaatttgtactctttctttaaggagctgtaatacaaataactttgtgcagtgttcatcaaagagagagacagtgaacctaaaactgaacctggaataaaactcaacatgcagatttgcctactcatagggactttgcctattaagtctaccaaattaaaagtcttatcattcaaaaaaaa

SEQ ID NO: 635 - DNA, 392 bp, Homo sapiens
  CDS (110)..(298)
tgtcgttgttctgagcctgccttgcgcagccaggcgtcgaggaggcggcggcgagtgctgcggtgctggctgggtggccgagtggtccccgcagcctctggacccagccatgctgctctggatgcagggcttcgtgctggaggcggtggcctgccaggataacgatgactacttacgctacgggatcctcttcgaagacctggattgcaatggggacggcgtggtggacatcattgagctccaggaggggctgagaaactggagctccgcgtttgaccccaactccgaggagcatggatagtgatggatcaatgacagtagactgggatgaatggaagtactactttttactgcatcctgcaacaaatatcactgaaatgattcatttctgg

SEQ ID NO: 636 - DNA, 843 bp, Homo sapiens
  CDS (252)..(689)
gggtacaattccttctcatagcagcagaggtgtctaatttgcaaatactctttaatgtgaagactaccttcagagtaagtttacaggcaccccctcttcagagagctgagtcaaagttgctgttgggcaccttctggtgtttagagaaaccagcaccagcgcgcccatttcgagcccaagtttccagctcgggtttccgggctcagaattttccaggagtgggttcttgggcagtggctgtgggagcaggaatggcgcagctagagggttactgtttctcggccgccttgagctgtacctttttagtgtcctgcctcctcttctccgccttcagccgggcgctgcgagagccctacatggacgagatcttccacctgcctcaggcgcagcgctactgtgagggccatttctccctttcccagtgggatcccatgattactacattacctggcttgtacctggtgtcagttggagtggtcaaacctgccatttggatctttggatggtctgaacatgttgtctgctccattgggatgctcagatttgttaatcttctcttcagtgttggcaacttctatttactatatttgcttttctgcaaggtacaacccagaaacaaggctgcctcaagtatccagagagccttgtcaacattaacactagccagtatttccaacactctatttttttaacttactttattatacagaagcaggatctatgttttttactctctttgcgtattcgatgtgtctttatggaatcataaaaccttcaccttcctcgcatttggtgcttcatgttccggaaacaaaatcatctgggttgtcttctgtgcggaca

SEQ ID NO: 637 - DNA, 1589 bp, Homo sapiens
  CDS (303)..(1400)
aactgagacatagatgagggcataggcagagcgaggaagcagcataccttgtgaggaatatatgacatgaactcaatgacagtgacagggaatgtgctctactgaatctcaaactctattgtaaagaaggaaagattccctgggatgcactaatttacattactggtgaaattacttatggtggtagagtcacagacagctgggaccaaagatgccttcgtactatcttgaaaagatttttttctcctgaaacattagaagaagattataaatactctgaatcaggcatctattttgcacccatggctgacagcctacaagagtttaaggactacattgaaaatctgcctttgatcgatgacccagaaatttttggaatgcatgaaaatgctaatctagtcttccagtacaaagagaccagcactttaatcaacaccatacttgaggttcagccaaggtcatctactggtggagagggaaaaagcaatgacgaaattgttcaagaacttgttgcttctgtccagaccagagttccagaaaaactggaaatggagggtgcttctgagagcctttttgtcaaggatcttcaaggacgtctgaactccttgaccaccgttcttggacaggaagtggaccggtttaacaacctgctgaagttaattcatacttctctggaaacactcaacaaagccatcgctggatttgtggtgatgtctgaagaaatggaaaaagtgtataacagtttcctcaacaaccaggttcccgctctgtggtccaacacagcctacccatccctgaagccactaggatcatgggtcaaagaccttatcctgaggacctcatttgtggatctgtggctcaaaagaggacagcctaagtcctactggatctctggtttcttctttcctcaaggatttctaacaggaactcttcaaaatcatgctcgaaaatacaatttgcctatagatgagctgagtttcaaatacagcgtaattcccacctatcgggatcaagctgcagtgatagaagctgccaagacagtgcaatttggacaagaactgcccatggacatggagttgccctctcctgaggatggtgttcttgttcatgggatgttcatggatgcttctcgatgggatgataaggagatggtgatagaagatgcattgcccggacagatgaatccagtgctgcctgtggtgcattttgaaccacaacaaaactataagccaagcccaacactttaccactgcccactttataaaacaggagcccgggcaggaacactctcaaccacaggacattcaaccaattttgtggtaaccgtcctgttaccctccaagcggtccaaagactactggattgccaagggatcagctttgctctgccagctgagcgaatgaaaaggtgccccctcagccctgaaaaagaaccaggccagagatctttcctaatgggagcaaaaggtttgaataatttatatgtgagcaaaacggtgttaattctgatttgacttaaacgtattgtgacttttatttctcttatgaccttaaaataaagtgtttgagttctttcaaaaaaaaaaaaaa

SEQ ID NO: 638 - DNA, 2444 bp, Homo sapiens
  CDS (86)..(577)
gctgggggcggggcaggggcaggtgtagcctctgtgcctcgttgtcccctggcgctacccggacatctctcagggtgccggcaccatgaagatctggacttcggagcacgtctttgaccacccgtgggaaactgttacaacagctgcaatgcagaaatacccaaaccctatgaacccaagtgtggttggagttgatgtgttggacagacatatagatccctctggaaagttgcacagccacagacttctcagcacagagtggggactgccttccattgtgaagtctatttcatttacaaacatggtttcagtagatgagagacttatatacaaaccacatcctcaggatccagaaaaaactgttttgacacaagaagccataattaccgtgaaaggagttagcctcagcagttaccttgaaggactgatggcaagtacgatatcctcaaatgctagtaaaggccgagaagcaatggaatgggtaatacataaattaaatgctgagattgaagaactgacagcctcagcaagaggaaccataaggactccaatggcagcagcagcgtttgcagagaagtgatcgtgacagttggtagacaacatcgggtactccaggtctctccaaactgactatatatttatttgttattttaaaaatacaactatattttgggtagtttttttttttttttttttgataagttggtgtaaggctatgtgacttgatcaaaacagatgcagggcctctaaataaaagggatcatctgaaattaatgttgtttgaaattactatctgattttgagggttccagtatttctgtgaaaattcaacaagaactccttggaaactggtattgatattcagtctccttaaggtagatttttcaagcttttcatacattggaactccacctgactttggaccaaccccagaacagagcagagccacctcctatagacgcccattgccctgctgctgtacacttcagcagcttgcacaagggagctcacttaaaaggagaaattgtgtagttttaaaatatattttgtgtaaaataccttactatgctataaaccaccattaaaaaccagtgttttgatttggtacttaaatatttttggagtgaaaattatcactaaagtaacatgactccaacaaaagtatggtttcattataaaagagtactgtattgatttgcccaagttttgtaacttagtaaaggtattaacttccttggatttgtactttgtgatttagtatgctgtatcgtgggctggttatgttaactgaaaaaaataaagtcattacctgagttttgcagtgctctaacttaaacagaagaacagctgttcacatcttttagcattttacatttgcctaacttaaaaattgccatgtgtcaaaatcatggttttgtaattgctaaggcatgatatgtcaggttatttgaatataattactttttgaagtaattgtgaccacaaaacatcttttttacatgaaggagctgtgtatcatttgaaattactcaaatgatgtcttgctctgaggcataaatcccaggtacttagtgtttttaataatatggtgccactgcaggatttgggggcggtggggaagaacaagcataatggtagggggaggcttggcctgaaactaaccactgagtgaattgcactgcaggttttacttaacgggaattccttatttgggatgtcaagagggcagctgcaaactgaaaaacaatccagtaaatgtactttgttttatgtattgtagcaggcaattaactactaaataatagctttgacatttgcaattgttgcatagagactatttttgctagaagatgattagctcttgcctttattttacagtgcttagtgtgataaacttctagtcatgtttcctatccaagagaccagttaatatatgtacataaaccacagaaatagtataacacactatttttaaattatcgttttcctacttaaattttgtttagcttaagacttcttaggacatttgtaaaagcaggttaaatttaataaggtttctgatttttttttgtaaccggagatagtttttacaagtgaaataacatttcagctaaataaaacatcgctaaataattgatatttgatgaaaatctgctttgtataatttctgtaaattatccttgttctgaaaaaggtgtaatgccctaatatttttaaatccttatcctttgattttttaaaaactgacctattgataaaactataaattttcattttccagtgcagttagttacctttttaaacataaatgcacaacaagcaaatgaatttaagagaactaaactggaataagtgttcataaatgaaacccttggactatttaataaagttgaaatgtgaattaaggaaaacttttgttaataaaaactttcttttaaaaaaaa

SEQ ID NO: 639 - DNA, 657 bp, Homo sapiens
  CDS (187)..(591)
  misc_feature (1)...(657): n = a,t,c or g
ggagagnngtngnnattgattatgatcggcctgangaattcggcacgaggttgccgaggagactaggagggggaggagaggggatctcgcgaaaggaaagaggtcgggagcgctcgcgagatctcggaccacccaacctgaaaggtgcttaggaagttgaaaggcccagaggaggcctccgggcaaatggccggagctggaccgaccatgctgctacgagaagagaatggctgttgcagtcggcgtcagagcagctccagtgctggggattcggacggagagcgcgaggactcggcggctgagcgcgcccgacagcagctagaggcgctgctcaacaagactatgcgcattcgcatgacagatggacggacactggtcggctgcttcctctgcactgaccgtgactgcaatgtcatcctgggctcggcgcaggagttcctcaagccgtcgggtcagtgcccggggaatgcacacccgcctgattccttctctgccggggagccccgtgtgctgggcctggccatggtacccggacaccacatcgtttccattgaggtgcagagggagagtctgaccgggcctccgtatctctgaccacgatggcgcttacctttcagacttcattaaacttatgaccgaaaaaaaaaaaaaaaaaaa

SEQ ID NO: 640 - DNA, 1619 bp, Homo sapiens
  CDS (241)..(915)
tctcgcgcccctgtcggcgcggaaccctggctcgtccgcggccagctccctggagcctcgcgtagcgggggcgcccccgcgagctgcgctctccccggcggagcgctcctcctccagcccccagcccgcagggtactttgccctcggagcgaaggaggctccagaactggtagagccgggccatcgggctgggcactccccgcgggcccgacccgggcctgggcgcccagccggacaggtatggcgttgacggtggatgtggccgggccagcgccctggggcttccgtatcacagggggcagggatttccacacgcccatcatggtgactaaggtggccgagcggggcaaagccaaggacgctgacctccggcctggagacataatcgtggccatcaacggggaaagcgcggagggcatgctgcatgccgaggcccagagcaagatccgccagagcccctcgcccctgcggctgcagctggaccggtctcaggctacgtctccagggcagaccaatggggacagctccttggaagtgctggcgactcgcttccagggctccgtgaggacatacactgagagtcagtcctccttaaggtcctcctactccagcccaacctccctcagcccgagggccggcagccccttctcaccaccaccctctagcagctccctcactggagaggcagccatcagccgcagcttccagagtctggcatgttccccgggcctccccgctgctgaccgcctgtcctactcaggccgccctggaagccgacagcatggactcggaagggggaagcctcctcctggacgaggactcggaagtcttcaagatgctgcaggaaaatcgcgagggacgggcggccccccgacagtccagctcctttcggctcttgcaggaagccctggaggctgaggagagaggtggcacgccagccttcttgcccagctcactgagcccccagtcctccctgcccgcctccagggccctggccacccctcccaagctccacacttgtgagaagtgcagtaccagcatcgcgaaccaggctgtgcgcatccaggagggccggtaccgccaccccggctgctacacctgtgccgactgtgggctgaacctgaagatgcgcgggcacttctgggtgggtgacgagctgtactgtgagaagcatgcccgccagcgctactccgcacctgccaccctcagctctcgggcctgagcccgccatgccctcagcctgcctcactgctgggccagggtcatgcctatataagttggcatggcagggacaatggtgggcagttgctcttacatgagctaagtttggagacctgaggcccctttgtcctcgctgggtgggccaaggtctgggacctgtcttggactgtgggagactcaccctcaccttgccaggcctctcccctgcaggactggcattgcactagtctgaggtggccactgcctttgatcaacctttgtgtgcgagggtctaagtagggtcgaacacagaagtgggaaggagaggggtgggccaggggctaatggtgtcactgtgtaaagtttttgacatactagctctataaatatatgaatatggacaaaaaaaaaaaaaaaaa

SEQ ID NO: 641 - DNA, 760 bp, Homo sapiens
  CDS (196)..(528)
tgtgacggctcgctgttgccctgaaggcaggcgagccagctgcccaggaaaggtggaaagtggtagaagctgacccctgagccctggcaggtctttaagtgcgtttgtgcagccgatttcaaggctaagagagaaagactgcctctgatccctgaaggaagaaaaaaaaaaaaaaaaccgggaaaaaaactcaccatggaaaatgtccccaaggaaaacaaagttgtggagaaggccccagtgcagaatgaagcccccgctttaggaggtggtgaataccaggagcctggaggaaatgttaaaggggtttgggctccacctgccccgggttttggagaggatgtgcccaataggcttgtcgataacattgatatgatagatggagatggagatgatatggaacggttcatggaggagatgagagagctaaggaggaaaattagggaacttcagttgaggtacagtctgcgcattcttataggggaccctcctcaccatgatcatcatgatgagttttgccttatgccttgaatcttgaggttaataatcataaaatccctgctttctaaattcgcatttttcctggtgtacctttaatgtgaaccttttggcattcttctgcaattttctgattggagattgcattttgacctagtctgtaagtttttctgtcagaagaggactttcatcaactttcatggaaagatgtttattgcatactgtaaagttaataaagcaatttaaaagcaaaaaaaaaaaa

SEQ ID NO: 642 - DNA, 1114 bp, Homo sapiens
  CDS (101)..(661)
acagacacgttgcccaccgctcctctcccgaggtctgtagtcgcggagaaacacatgttgcgttactaacgttcagaggtctgcgacagcttcgatttgaatgactagccgggaacaccaagtttcactgtgtaattgcgtccccctactccggcgcctcctttgcgacgctccctggagaaaagcacgcccactgcacgcgctcagtcgctacttccgctctcgagtgtctccaagcaagatggcggaggagccgcagtctgtgttgcagcttcctacttcaattgctgctggaggggaaggacttacggatgtctccccagaaacaaccaccccggagcccccgtcttccgctgcagtttccccgggaacagaggaacctgctggcgacaccaagaaaaaaattgacattttgctaaaggctgtgggagacactcctattatgaaaacaaagaagtgggcagtagagcgaacacgaaccatccaaggactcattgacttcatcaaaaagtttcttaaacttgtggcctcagaacagttgtttatttatgtgaatcagtcctttgctccttccccagaccaagaagttggaactctctatgagtgttttggcagtgatggtaaactggttttacattactgcaagtctcaggcgtggggatgaaccacaaagaaaatcaacttgctactacatgaaatggattttcacggaagagacagctctgaaaagttttgatgcttgtggcaagagacttaacagatgtgatctatttagtatgtgtctactctatgtttatgcataagaaaacatccatagcatgaatggactcagaaaaatgtgatttgtattaatgcaccagtcatcataaaagatggtcatgatagtacacccattgctcctacttgttactattattgctgcagatctgcctccaaggttgaaaaggagactaagactgtataaacattttcattgtcagttctcacaaatgactgaaattgttttcatggtaacaagttaaatatactaaagggttcctttttttttactgtttacatttatctctatgttcacctttttagtcacattgacctgctggctgaatacctcaac

SEQ ID NO: 643 - DNA, 2430 bp, Homo sapiens
  CDS (72)..(899)
tttcgtgtcccggctggcggctgcttccggtaggagagcggtgtagagcgagcaggtctcagctcctcgtcatgtcatacggtcccttagacatgtaccggaacccggggccctcggggccccagctccgggacttcagcagcatcatccagacgtgcagcggcaacatccagcggatcagccaagccactgctcagataaagaatttgatgagccagctaggaactaagcaggactcaagcaagctacaggaaaatctgcaacagttacaacactccacaaatcagctcgccaaggaaacaaatgaattgctgaaagaattagggtccttgccccttcccttatctacttcagaacagcgccagcagagacttcagaaggaacgcctcatgaatgacttctctgcagccttaaacaatttccaggctgtgcagagaagggtatctgaaaaggaaaaggagagtattgccagagcaagagctggatctcgtctttctgcagaagagaggcaaagagaggagcagctggtctcatttgacagccatgaggagtggaaccagatgcagagccaggaggatgaggtggccatcactgagcaggatttggaacttattaaagaaagagaaacggcaattcggcagctggaggctgacattttggatgtcaatcagatatttaaagatttggccatgatgatccatgaccagggtgatctgattgatagcatagaagccaatgtggaaagctcagaggtgcacgtcgaaagagccactgaacagttacagcgagctgcttactatcagaaaaaatctcgcaagaagatgtgtatcctggtgcttgtcctgtcagtgattattctaatcttgggacttattatctggctagtttataaaacgaagtgattgcctccgatcgttctcccgctgagctgttttcaagggcaagtgcttgttgaagtcttgccagaacaaactgatcacaagaagacagcatatatcagaacgtcctgtaatcatttagttagaaactaactactaactagtctttggaattcgtgacctatggagacagtaattatcaatttattgattctattgatttctcaaattaggaattaacttatgtggattttgcttcctcttgtattctgattgcccttcatcccaagtgtttactgaaaattccattctagatattcttgttttgacaaatgacactacagtctcgtaatattgtcttttatgtatatacaaaatttacctttttactagcatctgagatagagttactttctggtacccagtatattggagtctgtcagaaactctataataggccaccagtttttattatttaacatttttatttgaatttctaagaagcctattctctatctattttgaaagattttggcactatatttaattggaaggtaaaatattgtacatgtgatccagagtaaatgagaagtctctatctgagctggtcagttactggagtacatgttactaatctgggtttaaagtttacttcattatctgctagtgtcatccacagcagttcatcctcatccacactaagccatcctgttagcttttaaaggaagttaatttaattaacattaatatactctatgggctccctctcccacctgtctgcatagaaaggcagaattagacatagcatgctttggaaaagcaaataggaattgttgggaatgatttaatcttgttgttgttgttgttgttgttcacttgtggttctacattcctggtgaatgatgaatgttgctgtcaaagggctgccccctaccttataagggttgctgggcatttgaaggcaggaagatttttaaagatagattgaggttggtttaaaattattcctgtaaaccaacaataaagcaaagaagaggttcatttttgtaaataacactggtttcaaatagtgatgttagacttaacctaatttataaacaagagattaatatctccatgcatagttttagacaaaaaaagatgtttcaataaaattactgtcttgtaatataaatgttgtccacttcccttttccacaggcctagaacagttaaagggaacataatttgtttaggctcccacataaatgtgaatctggccaacaactttggttcatcctttagtgaattagaggatttggctaccctgagtatatttatattcatttcttctgttctccttctgttattatacttaatcttctaaactaaactaatgtgaacagtagggaagcaagggcccaaatgcataagtttctttgcactgttgcacttacttaatacaaataaatgttttttaaagcttttgtagtatgtttttatgagttaacatcctaatgtggtaggtattaggtaatgtgctgtcatgagaaaaattgagacttccaagaaaa

SEQ ID NO: 644 - DNA, 1509 bp, Homo sapiens
  CDS (68)..(1276)
ggaggccggagcagcacggccgcaggacctggagctccggctgcgtcttcccgcagcgctacccgccatgcgcctgccgcgccgggccgcgctggggctcctgccgcttctgctgctgctgccgcccgcgccggaggccgccaagaagccgacgccctgccaccggtgccgggggctggtggacaagtttaaccaggggatggtggacaccgcaaagaagaactttggcggcgggaacacggcttgggaggaaaagacgctgtccaagtacgagtccagcgagattcgcctgctggagatcctggaggggctgtgcgagagcagcgacttcgaatgcaatcagatgctagaggcgcaggaggagcacctggaggcctggtggctgcagctgaagagcgaatatcctgacttattcgagtggttttgtgtgaagacactgaaagtgtgctgctctccaggaacctacggtcccgactgtctcgcatgccagggcggatcccagaggccctgcagcgggaatggccactgcagcggagatgggagcagacagggcgacgggtcctgccggtgccacatggggtaccagggcccgctgtgcactgactgcatggacggctacttcagctcgctccggaacgagacccacagcatctgcacagcagtcaggaccggcctctccgattcttacccgccttgctgtctgtctcttggatgttggcgtggcgtgggccacgcatggatccgtggccggaacacgcacacccagccaggctacagctccagagtatggatagctgccttctctccagcctgtgacgagtcctgcaagacgtgctcgggcctgaccaacagagactgcggcgagtgtgaagtgggctgggtgctggacgagggcgcctgtgtggatgtggacgagtgtgcggccgagccgcctccctgcagcgctgcgcagttctgtaagaacgccaacggctcctacacgtgcgaagagtgtgactccagctgtgtgggctgcacaggggaaggcccaggaaactgtaaagagtgtatctctggctacgcgagggagcacggacagtgtgcagatgtggacgagtgctcactagcagaaaaaacctgtgtgaggaaaaacgaaaactgctacaatactccagggagctacgtctgtgtgtgtcctgacggcttcgaagaaacggaagatgcctgtgtgccgccggcagaggctgaagccacagaaggagaaagcccgacacagctgccctcccgcgaagacctgtaatgtgccggacttaccctttaaattattcagaaggatgtcccgtggaaaatgtggccctgaggatgccgtctcctgcagtggacagcggcggggagaggctgcctgctctctaacggttgattctcatttgtcccttaaacagctgcatttcttggttgttcttaaacagacttgtatattttgatacagttctttgtaataaaattgaccattgtaggtaaaaaaaaaaa

SEQ ID NO: 645 - DNA, 1167 bp, Homo sapiens
  CDS (140)..(1102)
gcacgaggcgaggagccgccgccaccaccagcgcacgagtcctggagctgtgaggagattcgggccgtcaccctgcctcccctgcgtcccgccaccggccgcttctgtcctcggacccattccaacaatctcgtaaaacatggtggattactatgaagttctaggcgtgcagagacatgcctcacccgaggatattaaaaaggcatatcggaaactggcactgaagtggcatccagataaaaatcctgagaataaagaagaagcagagagaaaattcaagcaagtagcggaggcatatgaagtgctgtcggatgctaagaaacgggacatctatgacaaatatggcaaagaaggattaaatggtggaggaggaggtggaagtcattttgacagtccatttgaatttggcttcacattccgtaacccagatgatgtcttcagggaattttttggtggaagggacccattttcatttgacttctttgaagacccttttgaggacttctttgggaatcgaaggggtccccgaggaagcagaagccgagggacggggtcgtttttctctgcgttcagtggatttccgtcttttggaagtggattttcttcttttgatacaggatttacttcatttgggtcactaggtcacgggggcctcacttcattctcttccacgtcatttggtggtagtggcatgggcaacttcaaatcgatatcaacttcaactaaaatggttaatggcagaaaaatcactacaaagagaattgtcgagaacggtcaagaaagagtagaagttgaagaagatggccagttaaagtccttaacaataaatggtgtggccgacgacgatgccctcgctgaggagcgcatgcggagaggccagaacgccctgccagcccagcctgccggcctccgcccgccgaagccgccccggcctgcctcgctgctgagacacgcgcctcactgtctctctgaggaggagggcgagcaggaccgacctcgggcaccgggcctgggacccctcgcgttcgcacaggattgcaagaaggtggcagcaggaaaacaaaccaaaaaagagtcaagacacaagtcgacaaggcattcttaaccgattgaggacggggcccaaagtgggtcaccggtcgatggtggccacccatgacagcccag

SEQ ID NO: 646 - DNA, 1831 bp, Homo sapiens
  CDS (1)..(1764)
atgccccagctcggcggcgggggcggcggcggcggcggcggcagcgggggaggcggcggctccagcgccggggcggccggcggaggggacgacctcggggcgaacgacgagctgatccccttccaggacgaggggggcgaggagcaggagccgagcagcgatagcgcctcggcgcagcgggacctagacgaggtcaagtcgtccctggtcaacgagtcggagaaccagagcagcagctcggactcggaggcggagaggcgcccgcagcccgtccgggacactttccagaagccgcgggactatttcgccgaagtgagaaggcctcaggacagcgcgttctttaaaggacccccgtaccctgggtaccccttcctgatgatcccggacctgagcagcccgtacctctccaacggacccctgtctcccggaggagcgcgcacctacctgcagatgaaatggcccctcctcgatgtcccctccagcgccacagtcaaggacacgaggtcaccatctccagcacacttgtctaataaagttcctgtcgttcagcacccgcatcacatgcatccgctgactcccctcatcacctacagcaatgaccacttctcccccggctcccctcccacccacctctccccagagatcgatccaaagacaggaatcccccggccccctcacccatccgagctgtcaccgtattacccactctctcccggagctgtcggacaaatcccccaccccctcggctggctcgtcccacagcaaggccagcccatgtactcccttcctcccggtggcttccggcacccttaccccgccctcgccatgaacgcctcgatgtccagcctggtctccagtcggttctctcctcacatggtggctcctgcccaccctggcctgcccacctcagggatcccccaccctgccatcgtctcccccatcgtcaagcaggaaccggcaccccccagcctgagccctgcagtgagcgtgaaatcaccagtcaccgtgaaaaaggaggaggaaaagaagccccacgtgaagaagcctctgaatgccttcatgttgtatatgaaggagatgagggccaaggtggtggctgagtgcaccctgaaggaaagtgcagccattaaccagatccttggaagaaagtggcacaacctgtctcgagaagaacaggccaagtactacgagctggcccggaaggagcggcagcttcactcgcagctctacccaacctggtcagcccgggacaactatggtaagaaaaagaagaggaagagagaaaagcagctgtcccagacacagtcacagcagcaagtccaggaggcagagggtgccctggcctccaagagcaagaagccatgtgttcagtacctgccccccgagaagccctgtgacagccctgcctcctcccacgggagcatgctggactccccggccactccctctgcagctttggcctcaccagctgcccctgctgccacccattcggagcaagcccagcccctctccctcaccaccaaaccagaaacccgggcccagctggctctccactctgccgccttcctgtcggctaaggctgcagcctcctcctctgggcagatgggcagccagcctcccctcctgtcccggcccctcccccttgggtccatgcccacagctctgctggcctctcccccgtccttccccgccacgctccatgcccaccaggccctcccggtgctacaggcccagcctctttccctggtcaccaagtctgcccactaagctccccccgacccctgcaggctgtcacatgactcattgagtagtaatgattcagaaaaaaaaa

SEQ ID NO: 647 - DNA, 1590 bp, Homo sapiens
  CDS (67)..(615)
ggtcttcgctgttgcccttaaggacggctgtgggcctgctgggggtgggggcccgaagcgccagagatggctgctcagcgagggatgcccagctccgccgtgagggtcctggaagaggcgttgggcatgggtttgacggcagccggggacgcgagggacacggcggacgcggtggcggctgagggcgcctactacctggaacaggtcaccataactgaagcatctgaagatgactatgaatatgaagagataccagatgacaattttagcatcccagaaggtgaagaagatctggcaaaagcaattcagatggcccaagaacaggctacagatactgaaattttggaacggaaaacagttcttccttcaaagcatgcagtacctgaagtaatagaagactttctctgcaatttcttgatcaaaatgggaatgaccagaactcttgattgctttcagtctgaatggtatgagttaatacagaaaggagtgactgaacttagaactgttgggaatgttccagatgtctacacccagattatgcttttggaaaatgagaacaaaaatttaaagaaagatttgaagcactacaaacaagcagctgagtatgttattttttaaatgacattttcttctttttcttttggactaaataaaagagttgagtgaagctgatatatgtaatataccagagccttaatttttgaaaactgaatttttctagttgtaaagaatgtgagaggcttcattagcaaattaattaaacagatgatcagaactatcacaattataacttaccaacaagaagggaatgcaggtagttgtttaggagatggtacattttttatataacattcacttccttgtgtatttgatagtcttttcatggtttataacattttctcctgtaaagataggctaatttctgaaataataattaaatttatagaaagccgagaggaaattgctagtttattcctggtagaggaatttctgtatttgaaaattctccagaaggaataatataaactgtggactttgggtgataatgatatgtaggttcgtcagttgttaacaaatgtatccctctgttgggggctattgataatggggaaggctgtgcatgtgtggcgagtagcgaggtgtactgggcacatctctgctacccttctaatcaaattctgctatgaaccttaacactgctctatcacctaacgtccattcaacccccaaacgttcaaaaccacaacccccatcccacaacaacatatacacacaaaatacacacataccacaaccacccacacacacaaaccacccaaaccaacacacgcacaccacacaccatctcactatctacttaatagctgctaaccaacaaagctcaagagtatctgatacacactacaaacataaaacgtagatacatccggaccttatctttacagatctataaactaggaaacaaagctacacactaacaaacaaaataagccaatcataaacaatacataaaactacattcgagaaaacaaaacatacaaataataatcactatccaattctcactacaaaataatacaaaaaaaaaaa

SEQ ID NO: 648 - DNA, 3119 bp, Homo sapiens
  CDS (43)..(2343)
tcagacgctgaactatgtggggatgagctgggtgctctgtggatgtgtatagttttaaacccccactgcaagttggagcaaaaggccagttggctaaaacagctgaagaaatggaatagtgttgatgtctgtccatgggaagatggaaatcatggcagtgaattacccaacttaaccaatgctctgcctcagggtgcaaatgccaaccaagattcatcgaacaggccacatcggacagtgttcacccgagccatcgaggcatgcgatctccactggcaggatagccacttgcagcacattatcagcagtgacctatacaccaactactgttaccatgacgacactgaaaactccctcttcgactcccgcgggtggcccctctggcatgaacatgttcctacagcctgtgcaagagtggacgcattacgttctcatgggtaccccagagaagcactgagactagcaatagctattgttaatacattaagacgacagcagcagaaacagttggaaatgttccgaacccaaaaaaaagagctaccccataaaaacataacctcgataaccaatctggagggctgggttggacatcccctggaccctgtgggcactctcttcagtagccttatggaagcctgccgcattgatgatgagaacctctctgggttctcagattttacagagaatatgggacagtgcaagtctctggaataccagcatctacctgcacacaaattcttagaagaaggggaatcctatttaacgctggctgtggaagtagccctgatagggctaggacagcagcgtatcatgcctgatgggctgtacacacaagagaaagtttgccggaatgaggagcagctcatttctaagcttcaggaaattgaattggatgacacactggtgaaaatttttcgcaagcaagcagtcttcctattagaagccggaccatatagtggtttaggtgaaataatccatcgggagagcgttccaatgcacacatttgccaagtatctcttcacctctctcctacctcacgatgctgaattggcatacaaaattgcactgagagcaatgcggttactagtattggaatctactgctccatcaggagacctcacccgcccacaccacattgcatcagttgttcccaaccgctaccctcgctggttcactctaagccacattgagtcccagcagtgtgagctggcatccaccatgctaactgcagccaaaggcgatgttcggaggctggaaacagtattagaatccatccagaaaaacattcactcctcatcacacatcttcaagcttgcccaagatgcatttaaaatagcaactctcatggacagtttgccagacatcactcttttgaaagtgtctctggagctgggcctgcaggttatgcgaatgacactgtcaaccttaaattggcgacggcgggagatggtgaggtggctggtaacgtgtgctactgaagtcggggtttatgccctggacagcatcatgcagacctggtttacactctttactcccaccgaggccacaagtatagttgcaactaccgtgatgtccaacagcaccatcgtccgcctccacctggactgccaccagcaggaaaagctggccagcagcgcccggacacttgcactgcagtgtgccatgaaggatccacagaactgtgccctctctgcgctaaccctttgtgaaaaggatcacatagcttttgagacggcgtaccaaattgttctcgacgctgctacgactggcatgagctatacacagctctttacaatagcacggtacatggagcaccgcgggtaccccatgagggcctacaagctggccaccctggccatgacccatctcaacctgagctacaatcaggacacacaccctgccattaatgatgttttgtgggcctgtgcgcttagccactcccttggtaaaaatgagcttgcagctataatacctctggtggtcaagagtgtcaagtgtgcaacggtactgtcagacattttgcgcagatgcactctgaccactcctggcatggtgggacttcatgggaggaggaactctggtaagctcatgtcactggacaaagcccccttgaggcaactcttggatgccacgatcggggcctacatcaacacaacgcactcacggctcacacacatcagtcctcggcactatagtgagtttatagagttcctcagcaaagcccgagagaccttcttaatggcgcatgatggacacattcagtttacacagtttattgacaacctgaaacaaatctacaaaggcaaaaagaaactgatgatgttggttcgggagaggtttggttgatagatcttgtatgaatggggtggggggtggggatgggagggatggtttgtttttacttgagcctgcctttgtaccctttttaacttaaagaacagagccacaccggtattatatgtgtatagttatattgcgtttgcagactaaattgtcatgttgtgaaagtttgtgtgttttttattttttccctatttctttctttcctttattttattattttttttaattttttttttctggttttgtatgagagagaggttaaaaaggtttggtttacactgagtatatgttgtcaagtggcaaaagtccacatagctctcctgttttctgtatacgttcacagcctcaaaaaaaataattgaaatggctttaaaaaccaaacaaaacacctccatcctgtgataagtacctcgaatggattcagctttactcctttgtaactcatctttacattttcagcatatttaaacaaaccaacaaaatgaaatactaatagtaaaaaggctgacccatgtggctttgcagtgctgttcgtccagaagcatggcacacgatgcttgtgcatgtggaaacttagcgactgtcaacatacattctcagggatttatccaaaaaaattaaaaaaagaatgagagcatttattgtactgtatatatattatagtatatgtctgaatattgaaaatataacattaactaatttataaaaaatattctatgtaatgcaaaatacttgaagctgcagtagcttggttttaaacaaaaacaaaaaaaaaa

SEQ ID NO: 649 - DNA, 1169 bp, Homo sapiens
  CDS (137)..(295)
gtgacagtaggttttgatgctagtgatcttcagatctttctctctggaaatgtgcagagagtgtcagtttcccaagttctgaggtaactctcagcccagatgtgaaatgggagcctaccagctggtatagaagggaatgggtaggaggcactgggtgctgactcattcagcactgtcccttttctatactgctgatacatcccatggttctgagaagccttatctcagtctatttggaagagagggaggaagagaaggaagtaacccaaagtactactcatttatcattgtatattgattagttaaagggataattaatttaatgctgaggagagtttgacagattttgaaaatgagtaaaggcaaaaaaatttttttagcctttattttgcctttgggaattttacagagtcaaagtaggcagaataagaaaatagttcttcaggagggccgacctttaaagaacttcaacatagtttcggaattgtggggaagagaagagtgactgagctgagaagtaataatagaataaagggttgagtaacttagaactgaaaatgatctcttttaaaaagaaattaaatcagacaccacatggtggtgtccttggatctcactgtgcagaattagcagtgtataaccatcttctcttttcatcttgttccaattctctcctctttcctttccattctgctttaagctcatgtgtcaggcagactttaccagagtgtcagacattacctaaaacacatacgttagccatgctgctggtatggagaaattccacaccatgattattagcctcctttaagctgaatgggatttaaccattctaggcaacacccctgaagggcatacctaacctcaatagtgttggcttttaaaacgtatgtttgtatggtagagaaactttgtaaaagaagaatccaagagaagtttgtgaggatcctacaaacccaggcccactcactttgctctaattctttctagtatcttgtagatctaatgggtctgggataaaaactttgaaaagtgtcaatattccatgtatgctgctgaaatgaagttaagtttggaaagaagtgatacctctagactgggtttatattaatctgggatataaatgaagaagacatactaatagaactccttgcttttaattggggaaa

SEQ ID NO: 650 - DNA, 1395 bp, Homo sapiens
  CDS (49)..(1212)
ggtccgcgcctgccccgccaggcgaagcgaggcgacccgcgtgcggccatggcttcgctgctgggagcctacccttggcccgagggtctcgagtgcccggccctggacgccgagctgtcggatggacaatcgccgccggccgtcccccggcccccgggggacaagggctccgagagccgtatccggcggcccatgaacgccttcatggtttgggccaaggacgagaggaaacggctggcagtgcagaacccggacctgcacaacgccgagctcagcaagatgctgggaaagtcgtggaaggcgctgacgctgtcccagaagaggccgtacgtggacgaggcggagcggctgcgcctgcagcacatgcaggactaccccaactacaagtaccggccgcgcaggaagaagcaggccaagcggctgtgcaagcgcgtggacccgggcttccttctgagctccctctcccgggaccagaacgccctgccggagaagagaagcggcagccggggggcgctgggggagaaggaggacaggggtgagtactcccccggcactgccctgcccagcctccggggctgctaccacgaggggccggctggtggtggcggcggcggcaccccgagcagtgtggacacgtacccgtacgggctgcccacacctcctgaaatgtctcccctggacgtgctggagccggagcagaccttcttctcctccccctgccaggaggagcatggccatccccgccgcatcccccacctgccagggcacccgtactcaccggagtacgccccaagccctctccactgtagccaccccctgggctccctggcccttggccagtcccccggcgtctccatgatgtcccctgtacccggctgtcccccatctcctgcctattactccccggccacctaccacccactccactccaacctccaagcccacctgggccagctttccccgcctcctgagcaccctggcttcgacgccctggatcaactgagccaggtggaactcctgggggacatggatcgcaatgaattcgaccagtatttgaacactcctggccacccagactccgccacaggggccatggccctcagtgggcatgttccggtctcccaggtgacaccaacgggtcccacagagaccagcctcatctccgtcctggctgatgccacggccacgtactacaacagctacagtgtgtcatagagctggaggcgccccgtccggtcagccctcgcgccctctccttcttgtgccttgagtggcagaggagccgtccagccacaccagctttcctcccaccgctcagggcagggaggtctgaactgcggccccagagcctttggcctaagctggactctccttatcggagcgcctttacccttc

SEQ ID NO: 651 - DNA, 1086 bp, Homo sapiens
  CDS (236)..(880)
cccacgcgtccgattcacgtgatctgcacgggcgcagatgtaggcaccggtccgagtgcctgccctctgtccccgcggctgggtctcgtctgctccggttcctgggctcctaattcttggtccagcttcttccaggtctgcgcgtctgttgttcccagcgctctgcgaagcctgaaaaggaggagcaacctgtccagaatccccgcaggacaggaaaaggaggggaaatctcgacatggaaaaactctacagtgaaaatgaaggaatggcttcaaaccaaggaaagatggaaaatgaagaacagccacaagacgagagaaagccagaagtaacttgtactctggaagacaagaagttagaaaacgagggaaagacagaaaacaagggcaaaacaggagatgaggaaatgttaaaggataaaggaaagccagagagtgagggagaggcaaaagaaggaaagtcagagagggagggagagtcagagatggagggaggatcagagagagagggagagtcagagatggagggaggatcagagagtgaaggagagccagggagtgaaacaagggctgcaggaaagcgcccagctgaggatgatgtacccaggaaagccaaaagaaaaactaataaggggctggctcattacctcaaggagtataaagaggccatacatgatatgaatttcagcaatgaggacatgataagagaatttgacaatatggctaaggtgcaggatgagaagagaaaaagcaaacagaaattgggggcgtttttgtggatgcaaagaaatttacaggaccccttctaccctagaggtccaagggaattcaggggtggctgcagggccccacgaagggacattgaagacattccttatgtgtagtgtccctggcaggcatttaccaggccatgtgctttaacgttacggtaatactttactttaggcatccctcctgttgctagcagccttttgacctatctgcaatgcagtgttctcagtaggaaatgttcatctgttacatggaaaaaatgttgatggtgcattgtaaaattaaaaaacacaacttgcagaaccaaaaaaaaaaa

SEQ ID NO: 652 - DNA, 3070 bp, Homo sapiens
  CDS (108)..(2615)
ttcgtagaccttttgaagatccttagtcagtgcggtggaattcgggcgcctggggccgccgctccccaccgtcgttttccccaccgaggccgaggcgtcccggagtcatggccggcctgaactgcggggtctctatcgcactgctaggggttctgctgctgggtgcggcgcgcctgccgcgcggggcagaagcttttgagattgctctgccacgagaaagcaacattacagttctcataaagctggggaccccgactctgctggcaaaaccctgttacatcgtcatttctaaaagacatataaccatgttgtccatcaagtctggagaaagaatagtctttacctttagctgccagagtcctgagaatcactttgtcatagagatccagaaaaatattgactgtatgtcaggcccatgtccttttggggaggttcagcttcagccctcgacatcgttgttgcctaccctcaacagaactttcatctgggatgtcaaagctcataagagcatcggtttagagctgcagttttccatccctcgcctgaggcagatcggtccgggtgagagctgcccagacggagtcactcactccatcagcggccgaatcgatgccaccgtggtcaggatcggaaccttctgcagcaatggcactgtgtcccggatcaagatgcaagaaggagtgaaaatggccttacacctcccatggttccaccccagaaatgtctccggcttcagcattgcaaaccgctcatctataaaacgtctgtgcatcatcgagtctgtgtttgagggtgaaggctcagcaaccctgatgtctgccaactacccagaaggcttccctgaggatgagctcatgacgtggcagtttgtcgttcctgcacacctgcgggccagcgtctccttcctcaacttcaacctctccaactgtgagaggaaggaggagcgggttgaatactacatcccgggctccaccaccaaccccgaggtgttcaagctggaggacaagcagcctgggaacatggcggggaacttcaacctctctctgcaaggctgtgaccaagatgcccaaagtccagggatcctccggctgcagttccaagttttggtccaacatccacaaaatgaaagcaataaaatctacgtggttgacttgagtaatgagcgagccatgtcactcaccatcgagccacggcccgtcaaacagagccgcaagtttgtccctggctgtttcgtgtgtctagaatctcggacctgcagtagcaacctcaccctgacatctggctccaaacacaaaatctccttcctttgtgatgatctgacacgtctgtggatgaatgtggaaaaaaccataagctgcacagaccaccggtactgccaaaggaaatcctactcactccaggtgcccagtgacatcctccacctgcctgtggagctgcatgacttctcctggaagctgctggtgcccaaggacaggctcagcctggtgctggtgccagcccagaagctgcagcagcatacacacgagaagccctgcaacaccagcttcagctacctcgtggccagtgccatacccagccaggacctgtacttcggctccttctgcccgggaggctctatcaagcagatccaggtgaagcagaacatctcggtgacccttcgcacctttgcccccagcttccaacaagaggcctccaggcagggtctgacggtgtcctttataccttatttcaaagaggaaggcgttttcacggtgacccctgacacaaaaagcaaggtctacctgaggacccccaactgggaccggggcctgccatccctcacctctgtgtcctggaacatcagcgtgcccagagaccaggtggcctgcctgactttctttaaggagcggagcggcgtggtctgccagacagggcgcgcattcatgatcatccaggagcagcggacccgggctgaggagatcttcagcctggacgaggatgtgctccccaagccaagcttccaccatcacagcttctgggtcaacatctctaactgcagccccacgagcggcaagcagctagacctgctcttctcggtgacacttaccccaaggactgtggacttgactgtcatcctcatcgcagcggtgggaggtggagtcttactgctgtctgccctcgggctcatcatttgctgtgtgaaaaaaaaaaaaaagaagacaaacaagggccccgctgtgggtatctacaatggcaacatcaatactgagatgccgaggcagccaaaaaagtttcagaaagggcgaaaggacaatgactcccatgtgtatgcagtcatcgaggacaccatggtatatgggcatctgctacaggattccagcggctccttcctgcagccagaggtggacacctaccggccgttccagggcaccatgggggtctgtcctccctccccacccaccatatgctccagggccccaactgcaaagttggccactgaggagccacctcctcgctcccctcctgagtctgagagtgaaccgtacaccttctcccatcccaacaatggggatgtaagcagcaaggacacagacattcccttactgaacactcaggagcccatggagccagcagaataacttgatccattccagacgctttgctgagtttcataaagcagggcactgagacacccgtccgtgttcctaaccagaaatcctaaagaagaggaattatacagaaggaacagcaggaggttttcctggacaccgccaacttcacattgctcagtggactcattctaagggcaagacattgaaaatgatgaattccaatctggatacagtcatgacagctcatgtgctcctcaacttaggctgtgcggttagccagcctgtaatgagaggagagaggcctgagtcacctagcatagggttgcagcaagccctggattcagagtgttaaacagaggcttgccctcttcaggacaacagttccaattccaaggagcctacctgaggtccctactctcactggggtccccaggatgaaaacgacaatgtgcctttttattattatttaaaaaaaaaaa

SEQ ID NO: 653 - DNA, 1568 bp, Homo sapiens
  CDS (137)..(1372)
ttagcgctctaggtacgaggccccggctgtttacggacggcgcccgcctcgattttcccaggcgagggcacgcccgcgtcagtcgcctccggggcaccttcctcgccacgacacgcagaattaattatctgaagaaatggatacttctccctccagaaaatatccagttaaaaaacgggtgaaaatacatcccaacacagtgatggtgaaatatacttctcattatccccagcctggcgatgatggatatgaagaaatcaatgaaggctatgggaattttatggaggaaaatccaaagaaaggtctgctgagtgaaatgaaaaaaaaagggagagctttctttggaaccatggataccctacctccaccaacagaagacccaatgatcaatgagattggacaattccagagctttgcagaaaaaaacatttttcaatcccgaaaaatgtggatagtgctgtttggatctgctttggctcatggatgtgtagctcttatcactaggcttgtttctgatcggtctaaagttccatctctagaactgatttttatccgttctgtttttcaggtcttatctgtgttagttgtgtgttactatcaggaggccccctttggacccagtggatacagattacgactcttcttttatggtgtatgcaatgtcatttctatcacttgtgcttatacatcattttcaatagttcctcccagcaatgggaccactatgtggagagccacaactacagtcttcagtgccattttggcttttttactcgtagatgagaaaatggcttatgttgacatggctacagttgtttgcagcatcttaggtgtttgtcttgtcatgatcccaaacattgttgatgaagacaattctttgttaaatgcctggaaagaagcctttgggtacaccatgactgtgatggctggactgaccactgctctctcaatgatagtatacagatccatcaaggagaagatcagcatgtggactgcactgtttacttttggttggactgggacaatttggggaatatctactatgtttattcttcaagaacccatcatcccattagatggagaaacctggagttatctcattgctatatgtgtctgttctactgcagcattcttaggagtttattatgccttggacaaattccatccagctttggttagcacagtacaacatttggagattgtggtagctatggtcttgcagcttctcgtgctgcacatatttcctagcatctatgatgtttttggaggggtaatcattatgattagtgtttttgtccttgctggctataaactttactggaggaatttaagaaggcaggactaccaggaaatattagactctcccattaaatgaatacctgattattattgtctcattaatgttcagttattaatatgtatactgccattttaatgtttacctatgaatgtcttttgtgttatataactgacagagtgctataaaatatataatatatacaaatgcagaaaatttattctagtctaatatattcaaatacaaatattaaatatatgaaaaaaaaaaa

SEQ ID NO: 654 - DNA, 3446 bp, Homo sapiens
  CDS (156)..(2747)
tttcgtcgtcagccggaccccacctggacggctggggccacttgtggtcgccgggaggtgtcacctctaactcttcgtgtcaggagtttttctacctctccggagttctttggctctcaggaacctagcacggcatcacgcgagtcccggctcagatgccccctccagggatccccccaccctttcctccgatggggctaccccccatgagtcagagaccaccagctatcccccccatgccacctggcatcctgcccccaatgcttccaccaatgggggcgccaccaccactcacacagataccaggaatggtacctccgatgatgccaggaatgctgatgccagcggtgcctgtcaccgcagcgacggctccgggtgcggacaccgccagctctgctgtggctgggacaggccctccgagggccctatggagtgagcatgtggccccagatgggcgcatctactactacaatgctgacgacaagcagtccgtgtgggagaagcccagcgtgctcaagtccaaggcagagctgctcctgtcccaatgtccctggaaagagtacaagtcggacacaggcaaaccttattactataacaaccagagtaaagagtcccgctggacccggcccaaggatctggatgacctagaggttctagtcaaacaagaggctgcagggaaacagcagcagcagctgccacagacacttcagccacagccacctcagccacagcctgaccccccacctgtgcctcctggccccaccccagtgcccacaggcctcctggaacctgagccaggtgggagtgaagattgtgatgtgttggaggccacccagcccctggaacaggggttcctgcagcagctggaggagggccccagcagttctggacagcatcagccacagcaggaggaggaggaatcaaagccagaaccagagaggtctggcctcagttggagcaaccgggagaaggcaaagcaggcattcaaggaactgctgagggacaaggctgtcccctccaatgcctcatgggaacaggccatgaagatggtggtcaccgacccccgttacagtgccttgcctaaactgagtgagaaaaagcaggcattcaatgcctacaaggcgcagcgggagaaggaggagaaggaggaggcccggctaagggccaaagaggccaagcagaccctgcagcatttcctggagcagcatgaacgcatgacctccaccacccgctaccggcgggcagaacagacctttggggagctggaggtctgggctgtggtccctgagagggatcgaaaagaggtttatgatgatgtcctcttcttcctggccaagaaggagaaggaacaggccaagcagctccggcgccgcaatatccaggccctaaagagcatcctggatgggatgagtagtgtcaacttccaaaccacgtggtcccaggcccagcagtacctcatggataaccccagctttgctcaggaccatcagctgcagaacatggacaaggaagatgcactgatctgttttgaggagcacatccgagctttggagagggaagaggaggaggaacgggagcgggcccggcttcgggagcgacgccaacaacgcaagaatcgggaggccttccagaccttcctggacgagctgcatgagacagggcagctgcactctatgtccacctggatggagctatatccagcagtcagcactgatgtccgctttgccaacatgctgggccagccgggctccacccctctggacttattcaagttctatgtggaggagttgaaggcacgattccatgatgaaaagaagatcattaaggacatccttaaggaccggggcttctgcgtggaggtgaacacggcctttgaggacttcgcccacgtcataagctttgacaagagggctgccgcactggacgcaggcaacatcaagctgaccttcaatagtctgctggagaaagcagaggcacgggagagggagcgggagaaggaggaggcacgcaggatgcggcgcagggaagctgcctttcgaagcatgctgaggcaggctgtgcctgctctggagctaggcactgcctgggaagaggtccgtgagcgttttgtgtgtgactcagcctttgagcagatcaccctggagtcggagcggatccggctcttccgggagttcctacaggtgctggagactgaatgccagcacctccacaccaaaggccgaaagcatggcaggaaaggcaagaagcaccatcacaagcgttcccactcaccctcaggctctgagtcagaagaagaggagctgcccccaccatctctccggccccccaagcggaggaggcggaacccctcagagtcaggctctgagccctcttcctcacttgattcagttgaaagtgggggtgctgcccttggaggacggggctccccttcctcccatcttcttggagcagatcatggccttcggaaagccaagaaaccaaaaaagaaaactaagaagagaagacacaagtcgaatagtcctgagagtgagacagaccctgaggagaaagctggcaaggagagcgatgagaaagaacaagaacaggacaaggacagggagctccaacaggcagagctccctaaccgttccccaggctttggaatcaagaaggagaagacaggctgggacacgtcagaaagtgagctgagtgagggtgagctggagaggcggcggcggacactcctacagcagctggatgatcaccagtgacccaatgagctgttctctgcctcgggtctgtgtgaggccatggctcctgggccaccctcaccgtctgcctcagacttcttccttagtctggtctgtgtccactttttctaaagtaaccccacccccagcacaccattgttggcacctctcaaggttgctcttggtgttcaagggtcccctactccctggactagtgcagtccttgccctcagccccagaccagagatgggtggtatatgccatgtggggtgggtgatgccagtagataaaagtgtgagagaaggggtctccagggaagagtcacaggctgttggacacagcctgggtggcagagggcagggtcatcaccctctagcatcagtgcctgctcctgcctgccctggccctgaggctccaccacttcttcctccacccaggacctaatgtacgtgtgttttgttttttgttttttaaataacaatatttataacatggccagtgactcttttccatgtgctactggggcaggctggggactggacacatgcccagcagagggcactagtgtctcatggcaggcctgcttccctttgtgtggctagagcccacctagccggttctcctttccccagagttctgatctcatctcctccaaaacagatgcagtgccccaaagatttcttttctatccccatagcccaggtcagactatatggg

SEQ ID NO: 655 - DNA, 3335 bp, Homo sapiens
  CDS (156)..(2636)
tttcgtcgtcagccggaccccacctggacggctggggccacttgtggtcgccgggaggtgtcacctctaactcttcgtgtcaggagtttttctacctctccggagttctttggctctcaggaacctagcacggcatcacgcgagtcccggctcagatgccccctccagggatccccccaccctttcctccgatggggctaccccccatgagtcagagaccaccagctatcccccccatgccacctggcatcctgcccccaatgcttccaccaatgggggcgccaccaccactcacacagataccaggaatggtacctccgatgatgccaggaatgctgatgccagcggtgcctgtcaccgcagcgacggctccgggtgcggacaccgccagctctgctgtggctgggacaggccctccgctgctcctgtcccaatgtccctggaaagagtacaagtcggacacaggcaaaccttattactataacaaccagagtaaagagtcccgctggacccggcccaaggatctggatgacctagaggttctagtcaaacaagaggctgcagggaaacagcagcagcagctgccacagacacttcagccacagccacctcagccacagcctgaccccccacctgtgcctcctggccccaccccagtgcccacaggcctcctggaacctgagccaggtgggagtgaagattgtgatgtgttggaggccacccagcccctggaacaggggttcctgcagcagctggaggagggccccagcagttctggacagcatcagccacagcaggaggaggaggaatcaaagccagaaccagagaggtctggcctcagttggagcaaccgggagaaggcaaagcaggcattcaaggaactgctgagggacaaggctgtcccctccaatgcctcatgggaacaggccatgaagatggtggtcaccgacccccgttacagtgccttgcctaaactgagtgagaaaaagcaggcattcaatgcctacaaggcgcagcgggagaaggaggagaaggaggaggcccggctaagggccaaagaggccaagcagaccctgcagcatttcctggagcagcatgaacgcatgacctccaccacccgctaccggcgggcagaacagacctttggggagctggaggtctgggctgtggtccctgagagggatcgaaaagaggtttatgatgatgtcctcttcttcctggccaagaaggagaaggaacaggccaagcagctccggcgccgcaatatccaggccctaaagagcatcctggatgggatgagtagtgtcaacttccaaaccacgtggtcccaggcccagcagtacctcatggataaccccagctttgctcaggaccatcagctgcagaacatggacaaggaagatgcactgatctgttttgaggagcacatccgagctttggagagggaagaggaggaggaacgggagcgggcccggcttcgggagcgacgccaacaacgcaagaatcgggaggccttccagaccttcctggacgagctgcatgagacagggcagctgcactctatgtccacctggatggagctatatccagcagtcagcactgatgtccgctttgccaacatgctgggccagccgggctccacccctctggacttattcaagttctatgtggaggagttgaaggcacgattccatgatgaaaagaagatcattaaggacatccttaaggaccggggcttctgcgtggaggtgaacacggcctttgaggacttcgcccacgtcataagctttgacaagagggctgccgcactggacgcaggcaacatcaagctgaccttcaatagtctgctggagaaagcagaggcacgggagagggagcgggagaaggaggaggcacgcaggatgcggcgcagggaagctgcctttcgaagcatgctgaggcaggctgtgcctgctctggagctaggcactgcctgggaagaggtccgtgagcgttttgtgtgtgactcagcctttgagcagatcaccctggagtcggagcggatccggctcttccgggagttcctacaggtgctggagactgaatgccagcacctccacaccaaaggccgaaagcatggcaggaaaggcaagaagcaccatcacaagcgttcccactcaccctcaggctctgagtcagaagaagaggagctgcccccaccatctctccggccccccaagcggaggaggcggaacccctcagagtcaggctctgagccctcttcctcacttgattcagttgaaagtgggggtgctgcccttggaggacggggctccccttcctcccatcttcttggagcagatcatggccttcggaaagccaagaaaccaaaaaagaaaactaagaagagaagacacaagtcgaatagtcctgagagtgagacagaccctgaggagaaagctggcaaggagagcgatgagaaagaacaagaacaggacaaggacagggagctccaacaggcagagctccctaaccgttccccaggctttggaatcaagaaggagaagacaggctgggacacgtcagaaagtgagctgagtgagggtgagctggagaggcggcggcggacactcctacagcagctggatgatcaccagtgacccaatgagctgttctctgcctcgggtctgtgtgaggccatggctcctgggccaccctcaccgtctgcctcagacttcttccttagtctggtctgtgtccactttttctaaagtaaccccacccccagcacaccattgttggcacctctcaaggttgctcttggtgttcaagggtcccctactccctggactagtgcagtccttgccctcagccccagaccagagatgggtggtatatgccatgtggggtgggtgatgccagtagataaaagtgtgagagaaggggtctccagggaagagtcacaggctgttggacacagcctgggtggcagagggcagggtcatcaccctctagcatcagtgcctgctcctgcctgccctggccctgaggctccaccacttcttcctccacccaggacctaatgtacgtgtgttttgttttttgttttttaaataacaatatttataacatggccagtgactcttttccatgtgctactggggcaggctggggactggacacatgcccagcagagggcactagtgtctcatggcaggcctgcttccctttgtgtggctagagcccacctagccggttctcctttccccagagttctgatctcatctcctccaaaacagatgcagtgccccaaagatttcttttctatccccatagcccaggtcagactatatggg

SEQ ID NO: 656 - DNA, 551 bp, Homo sapiens
  CDS (183)..(548)
tttcgtctgggaggagcagccggctggctgccctgcagaggtcaggtctgcccagcaaacccaggaaggtgtggcgtccccgcttcgcggccaagatggtgctggtgctgcgccatcctttgtgtgcccgggaagggcgttccgggagccgggtcgggggctcctgactcgcactgggcagcatgacggtgcgccggctgtcactgctgtgccgggacctctgggcgctgtggctgctgctgaaggccggcgcaggtgcgtggggcgcgggcgggtcctcgcctccccggaaggtgttgtggggcgacagtgcggggacgccgggcgggggtggacgttctgggcccagccctgtcctcagaggctgctggggcagaagcccggggctgggggatgccggggatggatgttggggtgggtgcctccgagaccagaggagccctgttccttggcagggaaggtgtgcacgggccttgcccgatggatggtttagggccatggccctggggtccctggtgagcagtggggccgcctctgcccttggcctgtga

SEQ ID NO: 657 - DNA, 1786 bp, Homo sapiens
  CDS (114)..(1514)
tttcgtgttggagcagcggaggcggcgcagaggcgcgtcttgggtccccgcggcggcgccggtgccaagcgctggtttgcggatacccaggcagatctgcagtgcctaatgccatgagtgtggtggttcagcatgtggaggaaaaagctgtgcactcctggtcgcgcatctccacggcagggaagaaggccctggaagaggcactgcttgtctttaacccaatgagccaggatctcagtgccacagaggcccagcttgtggccttcctgcagggcctgcgagatgatggcttccaacctaccatcctgcgcagtggtgatgtctatggctatagttcatgcacagctaatcccccaagccagacgaaactgcaagctcgtgcccctaacccaactgccacatcacctccagccagtgctccccgaactgccatgcggttgcctgcaggtcgggccacactgcttcccatgccgctatctggcagactggccaaagcatccacaccagcccttgccaagcatgctaccaccaacctgctgctgagctctctgaagcaatcaagtgccagccatgcccggggtgcagcagtgggcttccccacccacctttatccaggtgtctaccctgccatgcggctctctgttgtccttgaggccctggttccacttaagactcccatgccctgcttgggtgccaagcacaaggcacagtcactgcagctctcacttgcagactctcctctgaaactgcggaaaagttcagggaagggtccggggaaccctcggcccaaagctcccagaaaaaccacaagcaagggccccaagtgtctgactcgcaaaggccctggggctggaccccgacgaggctctgggcaccagagcaaaaccaacagagccactgggtcccccagtgtccggcgaatgaaagggggctctgccctgggcaccaaaacagcccaggccaaggtagctcgaacactggccaaagctgctcgtgcccaagccaaggtggctcgaacacaggccaaggctgctaaggcccgggccaaggccaaggcagcactggtcaaggctaaggccaaagctaaggcagcacaggtcaaggccaaggccaaagtcatggcagcacgggccaaggccaaggctaaagccaaggcagtacgggccaaggccaaggtggctcggacccagcccaggggcagaggcaggccaaagggatctgctaaggccagaactacaaggaagggccagaaaaaccgccctgagactgttgggcagaagaggaaaagggctgaggaggcaaaagatcttcctcccaagaagagaacacggcttgggccccgatctcctaaggcatggctagggcctggaacagcaaagctgctgaagttccgtgccataaaggtagataggcggtcctcggatgatgaggtgcggcagcgggctcagcggatcctccgcgtgaacctgtcacctgtaatacggctccagccattgctgccatattcagcagtctgattccttcacacggcaatgtttggggaaactaagcccagctgtctgtgtggctagtggcacagtgtgctatgtccgtggactccacaatcttgaggactccaggtgcctctctagggccctggtgaccaccagcctcctttcagaaaccagagtgggtggggtacggtggggtgggtgggcgggaggggtgttttcatggcgcgatgcactgtgacttgttattcaagttgtatgtctactgttccatctatcacgttttatacctttcc

SEQ ID NO: 658 - DNA, 2192 bp, Homo sapiens
  CDS (3)..(1172)
tgatgccagccgttcacgcgttcggtcctccttggctgactcaccgccctggccgccgcaccatggacgcccccaggcaggtggtcaactttgggcctggtcccgccaagctgccgcactcagtgttgttagagatacaaaaggaattattagactacaaaggagttggcattagtgttcttgaaatgagtcacaggtcatcagattttgccaagattattaacaatacagagaatcttgtgcgggaattgctagctgttccagacaactataaggtgatttttctgcaaggaggtgggtgcggccagttcagtgctgtccccttaaacctcattggcttgaaagcaggaaggtgtgctgactatgtggtgacaggagcttggtcagctaaggccgcagaagaagccaagaagtttgggactataaatatcgttcaccctaaacttgggagttatacaaaaattccagatccaagcacctggaacctcaacccagatgcctcctacgtgtattattgcgcaaatgagacggtgcatggtgtggagtttgactttatacccgatgtcaagggagcagtactggtttgtgacatgtcctcaaacttcctgtccaagccagtggatgtttccaagtttggtgtgatttttgctggtgcccagaagaatgttggctctgctggggtcaccgtggtgattgtccgtgatgacctgctggggtttgccctccgagagtgcccctcggtcctggaatacaaggtgcaggctggaaacagctccttgtacaacacgcctccatgtttcagcatctacgtcatgggcttggttctggagtggattaaaaacaatggaggtgccgcggccatggagaagcttagctccatcaaatctcaaacaatttatgagattattgataattctcaaggattctacgtttgtccagtggagccccaaaatagaagcaagatgaatattccattccgcattggcaatgccaaaggagatgatgctttagaaaaaagatttcttgataaagctcttgaactcaatatgttgtccttgaaagggcataggtctgtgggaggcatccgggcctctctgtataatgctgtcacaattgaagacgttcagaagctggccgccttcatgaaaaaatttttggagatgcatcagctatgaacacatcctaaccaggatatactctgttcttgaacaacatacaaagtttaaagtaacttggggatggctacaaaaagttaacacagtatttttctcaaatgaacatgtttattgcagattcttcttttttgaaagaacaacagcaaaacatccacaactctgtaaagctggtgggacctaatgtcaccttaattctgacttgaactggaagcattttaagaaatcttgttgcttttctaacaaattcccgcgtattttgcctttgctgctactttttctagttagatttcaaacttgcctgtggacttaataatgcaagttgcgattaattatttctggagtcatgggaacacacagcacagagggtaggggggccctctaggtgctgaatctacacatctgtggggtctcctgggttcagcggctgttgattcaaggtcaacattgaccattggaggagtggtttaagagtgccaggcgaagggcaaactgtagatcgatctttatgctgttattacaggagaagtgacatactttatatatgtttatattagcaaggtctgtttttaataccatatactttatatttctatacatttatatttctaataatacagttatcactgatatatgtagacacttttagaatttattaaatccttgaccttgtgcattatagcattccattagcaagagttgtaccccctccccagtcttcgccttcctctttttaagctgttttatgaaaaagacctagaagttcttgattcatttttaccattctttccataggtagaagagaaagttgattggttggttgtttttcaattatgccattaaactaaacatttctgttaaattaccctatcctttgttctctactgttttctttgtaatgtatgactacgagagtgatactttgctgaaaagtctttcccctattgtttatctattgtcagtattttatgttgaatatgtaaagaacattaaagtcctaaaacatctaaaaaaaaaaaa

SEQ ID NO: 659 - DNA, 2054 bp, Homo sapiens
  CDS (3)..(1034)
tgatgccagccgttcacgcgttcggtcctccttggctgactcaccgccctggccgccgcaccatggacgcccccaggcaggtggtcaactttgggcctggtcccgccaagctgccgcactcagtgttgttagagatacaaaaggaattattagactacaaaggagttggcattagtgttcttgaaatgagtcacaggtcatcagattttgccaagattattaacaatacagagaatcttgtgcgggaattgctagctgttccagacaactataaggtgatttttctgcaaggaggtgggtgcggccagttcagtgctgtccccttaaacctcattggcttgaaagcaggaaggtgtgctgactatgtggtgacaggagcttggtcagctaaggccgcagaagaagccaagaagtttgggactataaatatcgttcaccctaaacttgggagttatacaaaaattccagatccaagcacctggaacctcaacccagatgcctcctacgtgtattattgcgcaaatgagacggtgcatggtgtggagtttgactttatacccgatgtcaagggagcagtactggtttgtgacatgtcctcaaacttcctgtccaagccagtggatgtttccaagtttggtgtgatttttgctggtgcccagaagaatgttggctctgctggggtcaccgtggtgattgtccgtgatgacctgctggggtttgccctccgagagtgcccctcggtcctggaatacaaggtgcaggctggaaacagctccttgtacaacacgcctccatgtttcagcatctacgtcatgggcttggttctggagtggattaaaaacaatggaggtgccgcggccatggagaagcttagctccatcaaatctcaaacaatttatgagattattgataattctcaaggattctacgtgtctgtgggaggcatccgggcctctctgtataatgctgtcacaattgaagacgttcagaagctggccgccttcatgaaaaaatttttggagatgcatcagctatgaacacatcctaaccaggatatactctgttcttgaacaacatacaaagtttaaagtaacttggggatggctacaaaaagttaacacagtatttttctcaaatgaacatgtttattgcagattcttcttttttgaaagaacaacagcaaaacatccacaactctgtaaagctggtgggacctaatgtcaccttaattctgacttgaactggaagcattttaagaaatcttgttgcttttctaacaaattcccgcgtattttgcctttgctgctactttttctagttagatttcaaacttgcctgtggacttaataatgcaagttgcgattaattatttctggagtcatgggaacacacagcacagagggtaggggggccctctaggtgctgaatctacacatctgtggggtctcctgggttcagcggctgttgattcaaggtcaacattgaccattggaggagtggtttaagagtgccaggcgaagggcaaactgtagatcgatctttatgctgttattacaggagaagtgacatactttatatatgtttatattagcaaggtctgtttttaataccatatactttatatttctatacatttatatttctaataatacagttatcactgatatatgtagacacttttagaatttattaaatccttgaccttgtgcattatagcattccattagcaagagttgtaccccctccccagtcttcgccttcctctttttaagctgttttatgaaaaagacctagaagttcttgattcatttttaccattctttccataggtagaagagaaagttgattggttggttgtttttcaattatgccattaaactaaacatttctgttaaattaccctatcctttgttctctactgttttctttgtaatgtatgactacgagagtgatactttgctgaaaagtctttcccctattgtttatctattgtcagtattttatgttgaatatgtaaagaacattaaagtcctaaaacatctaaaaaaaaaaaa

SEQ ID NO: 660 - DNA, 615 bp, Homo sapiens
  CDS (127)..(561)
tttcctcggtgccggtgcgggctggggcagtgcagtgagtagcggtcttggggtgtgcgatctcgctgagcctcctcacacggttcgtcgtctcgggttcgagcccagtgggcttagccactcgccatggactcccagaaagaagctctacagaggatcatttcaactctggcaaataaaaatgatgaaattcagaactttattgatacactacatcatacactaaaaggagttcaggaaaattcgtccaacatactctcagagttagatgaagaatttgatagtttatactctatactggatgaagtaaaagaaagtatgattaactgtatcaagcaggaacaagctcgtaaatcccaagagttacagagtcagattagtcaatgtaataatgccctggagaactctgaagaactattagaatttgcaacaaggtcattagatataaaggaacctgaagaattttcaaaggtacacaaaaactgcattaatacacttaacaagggaagttgtatttttaaaaaggcgtttttgtttttctttagttttggatttctttactgatttctaatactaataaagccttggggtttcttgataagtaaaaaaaaaaaa

SEQ ID NO: 661 - DNA, 1751 bp, Homo sapiens
  CDS (186)..(1346)
gtagccttgcctatgagcctgcagtttttaatttgtctgagtcctggacctcagcctagatgtaaccttgctctgttgctgtcctctataggcctggcactgtggactcggtgttgtctagcagagaggccttgaggaagtggcccagcagtgtgcttgcgtttccaaggattgagctcaaggagatggaaaacaaactgcctatggagacccttgtagaagaatgtggagagaatagagaaaggaagtgcaagttaaaagaccagtcagacaaagaagaaggcaccagagatatctcatcacccaaaagacttcgagatagacaagctttgttccctgccaaagtgacaaatgtcagcttgctggaaaagtttgaacgaagtgagagtggtgggaagattatgacccctgaaagcttatcatatccaagttgtctgaaacacgacagtgagatgaagccccaaacatctccagcttgccaggatcataacaaggcaggacagatgaaaagtctggctactagagaacagaatcagaaaaatgctgcctataatcttggagttgctgaagctataagaaaccacaagaatgagaaaccggaattttatatttccttcctatttgacaaacggccactcagtcctgcgcttaatgctcttaagcaagaggaatattcccggagtctcctgaaacaaatggataacagacaggaaaacgaaataaagcaaagacaatacagagagttgatggaccgcctggaacaagtgcaactcacagaggaacttgctgcgcaaagagcgaaatttttaaaagataagatggaagaaacacagtgttacaagagagctttggatgcacagataaagaacaaaccctctcggctgcccccctttgagccagactcctctgagcccatctttggtaagaatgagggtgaactgatggtggaaaagcaaaagcgagaacaaaattacatgaaacaccagctggaggcagctgctaaccacaagaggaaagccatcctgcatcaactagtggaccagaggcgggatttgcaaatgcttcagaggacacaaagagagcacttggcagacagaaccgctgagctggagcgagtaaatagagtcaaccaatgcttacaggaggactgggaaaggagtgctgcgatgaagaagcagcgagacctggaggacaaggcttttgaacgggcttcagacaagctgtttctcctagaccagtgtgagaagtatcggcgctgcaagcaatgccagaggcgcacctccaacgtgggcgagagcaacctgtggcccctgaacaagttcctgcctggctcccggttgcttgtgtaaaactcaaagtttggctcttcgtttcccggggaaagtttttatcttttacatgtttgggggtgattgtgaaactgcgtatttttacctcagagaaaaaaatcattgtttaggtttggtgctttcattagattgcttgttaagcccttattgaattcactcctgctttcctcccacccccaattatttcctatactagtttctgatggcagtgaaggtgtctgaatggtcctgagggctagaacctgctgcacaggggctgggaatgggatccagcttcattatggctgctggggtgctgctgacccagccctgctgctgctccatgactttgtgtacaaaacttttttcatctgtaatgaatagtggcaataataaatattttttaagcgcctgaaaaaaaaa

SEQ ID NO: 662 - DNA, 900 bp, Homo sapiens
  CDS (580)..(807)
ggcggcggcggcggcggcggcaagtgcacggggtacgcccgtcccgctccgcaggggcagagggggaggggatgaagctgcccggcgccattttgcttgtgggctgccgcccgccgttgcctctccgcggaggctcgaagatagcaaactggaggcggtgagggggacggaatctctgtctttctgacaacagatgcattcaacaatccaccgaaggtttgaggaagtgtcggtattcggtgggactggttctttccccctttcccccagtggccctcaagtctggatataggtgagcttgggcatgccagtattgggtgcacgaacaaggacagcagggcttgggaacgaactccctcccgtcaccctccgaaagcgatacaccttctccccctcccaaaaaaccccagtcccgtctccccgttcctctccccctcctcccccagcccagtctggcctccagcgctgggtgaacccggttggggtgtcactcgacgcccactaggggctgaggaggctccagtgcgcaggctccgggcaccggataaaagcggagctggcgagtctagtgctgtctcgatggaggagcaagaaacggaagaggtcggggggagaagcagccggaaaaatgcagccaccgtcaacgccgcctccctgccaccgtgcttcggggtaaaaagctgccgttgccgtcggtgcagttgccgtcgctgcctcctatacttctcttggcctcggggaaggatttccccaccggtgggacaatgtgcggggaggggagtgggaattcctttatatggcggtgattaaacgagggagggacagacagtgatctcgaagaaaaaagggggagaccaaagaataaaagaagggtttccccactaaaatgaaaaaaaaaaa

SEQ ID NO: 663 - DNA, 2130 bp, Homo sapiens
  CDS (40)..(1875)
gttgcagatactcttcaaaaagtttgggctgtattggaaatgaatttagaacagtatgcagtttctctcttaagactaatgtttaaaagcaagtgcaagtctttggaatcttatccatgctatcaagatgaagaaactaagattgcttttgcagattatactgtgacttatcaagaacagccaccaaattcttggtttatagtattcagagaaacatttttggttcatcaagacatgattttggttcccaaagtatatactacacttccaatctgtatcctacacattgttaataatgacacaatggagcaagtgccaaaggtgttccaaaaagtggtgccttatctttataccaagaataagaagggatacacttttgtggcggaagcgtttacaggcgacacatatgtagcagcctcacgatggaaactgcgtctcatcggttcttctgctccactgccatgcctctctcgagactctccatgcaattcctttgccataaaggaaatccgagattactacatacccaatgataagaaaattttattcaggtattcggttaaagttctaacaccacaacctgctacaatacaggtacgcacatccaaaccagatgcattcatcaagctgcaggtcctagaaaatgaagaaactatggtgagctccactggaaaaggccaagctataatcccagcatttcacttcttgaagagtgagaaaggtttgagctcccagtcttatggtgaaagacacgaggagttaattaacttaggaagcccagactcccacactattagtgagggacaaaaatcttcagtaacttccaaaacaacaaggaaaggcaaagaaaagtcttctgagaaagaaaagacagccaaagaaaaacaagcacctcgctttgagcctcagatatccactgttcaccctcaacaagaagacccaaataaaccctactggattttgaggttggtcactgaacacaatgaatcagaattatttgaagtgaaaaaggatacagaaagggcagatgaaatccgagccatgaaacaagcctgggagacaactgagccaggaagagcaatcaaggcttctcaggctcgtttgcattaccttagcgggttcattaagaaaacatctgatgctgagagtccgcctatatctgaaagccaaactaaaccaaaagaagaagtagaaacagctgcacgtggcgtaaaagaaccaaactcaaagaattctgcaggttcagagagcaaagagatgacacaaacaggatcagggagtgcggtgtggaagaagtggcaattgaccaaaggcttgagggatgtggcaaaatccacgagtagcgaaagtggaggagtgtcttcaccagggaaagaagagcgcgagcagagcacacggaaggaaaacattcaaacaggacctcgtacacgatctccaacaattttggaaacatctccacgacttattcgaaaagcactagaatttatggatttaagtcaatatgttcggaaaacagatacagatcctctgctgcaaacagatgaattgaatcagcagcaggcaatgcaaaaggcggaagaaattcatcagtttcgacagcataggaccagagtccttagcattcgaaacattgaccaagaagagcggttgaagttaaaggatgaagtcctggatatgtataaggaaatgcaggactccttagatgaagcccgacagaaaattttcgacatccgggatgagtacagaaacaaattgctggaagctgagcgcctaaagctggaaactctggctgctcaggaagcagccatgaagctggagacagaaaagatgaccccagctcctgacacacagaaaaaaaagaaaggaaagaaaaagtaaccaggggatgtccaatactaccctgcttctggagagaaaaaatctatttgtaatgatctttaactgcctgctgttaagatattaggccaactgaaaatagaaatttctctttcttagaaatattttaatgctaacttgttagttttcctcagaaagctagtatttgaagccattcgagtttaagatgctctaatttcaataaaatagcttccaaatatttaataaaatatgtttgacactctaaaaaaaaaa

SEQ ID NO: 664 - DNA, 3662 bp, Homo sapiens
  CDS (251)..(2362)
gccgactgcatttcctcagtcacgggcctagaactccaaggagaaaggcggcggtgcgtgttgctgcgagtgggacgcgcactggtcggtgccggctcaggagccggggaattcatgatttgttcctgtagctgaaacatacattgaatgctttctgccctggcatgaacttacatggtcagagctggtttttcctgccctcaaatatatttctctgactctaccggttagactagaaaaatctttaagaatggagtctaaaccttcaaggattccaagaagaatttctgttcaaccttccagctccttaagtgctaggatgatgtctggaagcagaggaagtagtttaaatgatacctatcactcaagagactcttcatttagattggattctgaatatcagtctacatcagcatcagcatctgcgtcaccatttcaatctgcatggtatagtgaatctgagataactcagggagcacgctcaagatcgcagaaccagcaacgggatcatgattcaaaaagacctaaactttcctgtacaaactgtactacctcagctgggagaaatgttggaaatggtttaaacacattatcagattcatcttggaggcatagtcaagttcctagatcttcatcaatggtacttggatcatttggaacagacttaatgagagagaggagagatttggagagaagaacagattcctctattagtaatcttatggattatagtcaccgaagtggtgatttcacaacttcatcatatgttcaagacagagttccttcatattcacaaggagcaagaccaaaagaaaactcaatgagcactttacagttgaatacatcatccacaaaccaccaattgccttctgaacatcagaccatactaagttctagggactccagaaattctttaagatcaaatttttcttcaagagaatcagaatcttcccgaagcaatacgcagcctggattttcttacagttcaagtagagatgaagccccaatcataagcaattcagaaagggttgtttcatctcaaagaccatttcaagaatcttctgacaatgaaggtaggcggacaacgaggagattgctgtcacgcatagcttctagcatgtcatctacttttttttcacgaagatctagtcaggattccttgaatacaagatcattgaattctgaaaattcttacgtttctccaagaatcttgacagcttcacagtcccgtagtaatgtaccatcagcttctgaagttcccgataatagggcatctgaagcttctcagggatttcgatttcttaggcgaagatggggtttgtcatctcttagccacaatcatagctctgagtcagattcagaaaattttaaccaagaatctgaaggtagaaatacaggaccatggttatcttcctcacttagaaatagatgcacacctttgttctctagaaggaggcgagagggaagagatgaatcttcaaggatacctacctctgatacatcatctagatctcatatttttagaagagaatcaaatgaagtggttcaccttgaagcacagaatgatcctcttggagctgctgccaacagaccacaagcatctgcagcatcaagcagtgccacaacaggtggctctacatcagattcggctcaaggtggaagaaatacaggaatatcagggattcttcctggttccttattccggtttgcagtccccccagcacttgggagtaatttgaccgacaatgtcatgatcacagtagatattattccttcaggttggaattcagctgatggtaaaagtgataaaactaaaagtgcgccttcaagagatccagaaagattgcagaaaataaaagagagcctccttttagaggactcagaagaagaagaaggtgacttatgtagaatttgtcaaatggcagctgcatcatcatctaatttgctgatagagccatgcaagtgcacaggaagtttgcagtatgtccaccaagactgtatgaaaaagtggttacaggccaaaattaactctggttcttcattagaagctgtaaccacctgtgaactatgtaaagagaagttggagcttaacctggaggattttgatattcatgaactacatagagctcatgcaaatgaacaagctgagtatgagtttatcagctctggtctctacctagtggtgttattgcacttgtgcgaacaaagcttttctgatatgatgggaaatacaaatgaaccaagcacacgtgtccgatttattaaccttgcaagaactcttcaggcacatatggaagatctcgaaacttcagaggatgattccgaagaagacggagaccataacaggacatttgatattgcctaacttcatataagacagatggatgatctgtgaacataagtgtttattaaaaatggcaattaaatataaattacttttgtgggggaatgcctaataaatacattgactatatataaaatgaatatatacatacacatgtatgcctgtatatatatattcattctccagtgttgctgaattaaaattctgctggactttttaacatagcaaatccgatgtttataaactggtaatcaaaaaggttttttcttttaggtgagtgggaaagtattacccttgttttaaatatctaagcaatgcctatcaacccttttttgtgttatgattactgtagtcatatttatgaaaaaaggtttgtgttttactcttgctagtgagaaaagtgggacaaaatatacttttgaaataaaatgctatatggcacctaattattttttcttttaaaatgccttaagttgcagtctaatttttaaacactggaagcaaatgattatcaaaatgagactgcaacttaaggcattttaataatcattgcttccagtgtttaaaaattaaaaaaagaatggggagaaggttatgagaagagcattattaagtttccaaatttaatttgaattccaaattcacctagcaataaaatctaatttttaaaaagtatataaatataaaatgtataaatgatggatagatttttgtattgatttgcaaaatgcagattatatttgataggctatagtatgtagatattccttttaggaatattacagctgtaaattatatgagacttgccagtcaaatgctatttggtttaaaaaaattattgcaatctcaagttaatggaatatttttaaatcccacattcagagtttaaaacactggttttcaatgtgttttttagtgttgtcacttgtttatagataaatatataaataacctgtttggatcctggtcctttttaactgttccttggtaattctgagcatttatttgatgacttaatatttttcactacctttggagaacagatgaacattattcaccatgaatggatctatactgtgtggtcatgagttgtgtatacttccataacactgtatttttcttctgtcagtacccttaggatacactttaaaacaccttaaggtctgatgttatggcaacaaactactttttcaaacctaaataggaaccatgtaatttctcaaaagtgattgaacagtttgcccacacttagtttgttggtcttatgtaaaacattggctcaaaataaagtacacactgatttattttaaaaaaaaaa

SEQ ID NO: 665 - DNA, 1232 bp, Homo sapiens
  CDS (80)..(1018)
gatactcctccggaatttccgggtcgacgattccgtcctatctcaagagagagatattttactcatttcctggttgtgaatgatgggctcttggaagcactgtctttttagcgcgtctcttacctctgccctgatttttgtatttgtttacaatactgagttatgggagaataaacgttttctgagggcagctctgtccaatgcttcactgttagcagaagcctgtcatcagatttttgaggggaaagttttttacccaacagaaaatgcattgaaaactacccttgatgaagctacctgctatgagtacatggttcgaagccactatgtaacagaaacactctctgaagaagaggctgggttccctttagcttacacagtgaccatccacaaagacttcggcacttttgagaggctcttcagggcgatttatatgccccaaaatgtctactgtgtgcacctggatcagaaggcgacggatgcctttaaaggtgcagtgaaacagttactcagctgcttcccaaatgcttttctggcttccaagaaggagtcggttgtctatggggggatctccaggctccaggctgacctgaactgcctggaagaccttgtggcctctgaagttccctggaagtatgtcatcaacacctgcgggcaagactttcccctgaaaaccaacagggaaatagttcagtatctgaagggatttaaagggaaaaatatcacccccggagtgctgcctcctgaccacgctgttggacggactaaatacgtccaccaagaactgttaaaccacaaaaattcctacgtgattaaaacaacaaaattaaaaactcctcctcctcatgacatggtgatttactttggcacggcctacgtggctctcacaagggactttgctaacttcgtcctccaagaccagctcgcacttgacttactctcctggtccaaggacacctacagccccgacgaacatttctgggtgacactcaacaggattcccggtatgtacgtctcttaacttttatttttacgaataaacactgcatggtcaatactaaataagttgctttgaaaagagtggaaaaaatgggacaaacttctttacggttttaaatgtcaaattaaaaaaaaaatttcatctgtaaaatggtaaaatggagatgtgttatatcacccactcttgtgaaccgctctgttcacaggacaaaagaccgaaggaacactggcca

SEQ ID NO: 666 - DNA, 3396 bp, Homo sapiens
  CDS (92)..(2773)
cgccttgtgtgtgctggatcctgcgcgggtagatccccgagtaattttttctgcaggatgaattaagagaagagacacttgctcatcaggcatggagagcactttgtcagcttccaatatgcaagacccttcatcttcacccttggaaaagtgtctcggctcagctaatggaaatggagaccttgattctgaagaaggctcaagcttggaggaaactggctttaactggggagaatatttggaagagacaggagcaagtgctgctccccacacatcattcaaacacgttgaaatcagcattcagagcaacttccagccaggaatgaaattggaagtggctaataagaacaacccggacacgtactgggtggccacgatcattaccacgtgcgggcagctgctgcttctgcgctactgcggttacggggaggaccgcagggccgacttctggtgtgacgtagtcatcgcggatttgcaccccgtggggtggtgcacacagaacaacaaggtgttgatgccgccggacgcaatcaaagagaagtacacagactggacagaatttctcatacgtgacttgactggttcgaggacagcacccgccaacctcctggaaggtcctctgcgagggaaaggccctatagacctcattacagttggttccttaatagaacttcaggattcccagaacccttttcagtactggatagttagtgtgattgaaaatgttggaggaagattacgccttcgctatgtgggattggaggacactgaatcctatgaccagtggttgttttacttggattacagacttcgaccagttggttggtgtcaagagaataaatacagaatggacccaccttcagaaatctatcctttgaagatggcctctgaatggaaatgtactctggaaaaatcccttattgatgctgccaaatttcctcttccaatggaagtgtttaaggatcacgcagatttgcgaagccatttcttcacagttgggatgaagcttgagacagtgaatatgtgcgagcccttttacatctctcctgcgtcggtgactaaggtttttaacaatcacttttttcaagtgactattgacgacctaagacctgaaccaagtaaactgtcaatgctgtgccatgcagattctttggggattttgccagtacagtggtgccttaaaaatggagtcagcctcactcctcccaaaggttactctggccaggacttcgactgggcagattatcacaagcagcatggggcgcaggaagcccctcccttctgcttccgaaatacatcattcagtcgaggtttcacaaagaacatgaaacttgaagctgtgaaccccaggaatccaggagaactgtgtgtggcctccgttgtgagtgtgaaggggcggctaatgtggcttcacctggaagggctgcagactcctgttccagaggtcattgttgatgtggaatccatggacatcttcccagtgggctggtgtgaagccaattcttatcctttgactgcaccacacaaaacagtctcacaaaagaagagaaagattgcagtcgtgcaaccagagaaacaattgccgcccacagtgcctgttaagaaaatacctcatgacctttgtttattccctcacctggacaccacaggaaccgtcaacgggaaatactgctgtcctcagctcttcatcaaccacaggtgtttctcaggcccttacctgaacaaaggaaggattgcagagctacctcagtcggtgggaccgggcaaatgcgtgctggttcttaaagaggttcttagcatgataatcaacgcagcctacaagcctggaagggtattaagagaattacagctggtagaagatccccactggaatttccaggaagagacgctgaaggccaaatacagaggcaaaacatacagggctgtggtcaaaatcgtacggacatctgaccaagtcgcaaatttctgccgccgagtctgtgccaagctagagtgctgtccaaatttgtttagtcctgtgctgatatctgaaaactgcccagagaactgctccattcataccaaaaccaaatacacctattactatggaaagagaaagaagatctccaagccccccatcggggaaagcaaccccgacagcggacaccccaaacccgccaggcggaggaagcgacggaaatccattttcgtgcagaagaaacggaggtcttctgccgtggacttcaccgcgggctcgggggaggaaagtgaagaggaggacgctgacgccatggacgatgacaccgccagtgaggagaccggctccgagctccgggatgaccagacggacacctcgtcggcggaggtgccctcggcccggccccggagggccgtcaccctgcggagcggctcagagcccgtgcgccggccacccccagagaggacacgaaggggccgcggggcgccggctgcctcctcagcagaggaaggggagaagtgcccgccgaccaagcccgaggggacagaggacacgaaacaggaggaggaggagagactggttctggagagcaacccgttggagtggacggtcaccgacgtggtgaggttcattaagctgacagactgtgcccccttggccaagatatttcaggagcaggatattgacggccaagcactcctgcttctgacccttccgacggtgcaggagtgcatggagctgaagctggggcctgccatcaagttatgccaccagatcgagagagtcaaagtggctttctacgcccagtacgccaactgagtctgccctcgggaggtggcccattattgctgggatgcggtgttggtaaaggtttccaggactgaaactttgattttccgggatatgttaaatggtacagccactaagtatcaccagaaaaccagaagcccaggatcttctgcctccgccagcctgtgagctgtttccatgttttcaaagcacagcagcagtcgcttctggggagtgccagttaaagtcatgcatcagaccctgccagacgtgggcctgcttcttggctcacccacgttttgcctttctcctgccccaaatcaggcagctcccttggagcagggtttcctcagatgaggactgcattctttgaaaacaaagaatgtcgccaaggaagaaacctcacgccatgctgtagtgtttcctgtaatcacacgagcacatttatatatgcagtttcccatggataggcgtgtgaccctggttgagtggcacctgcggtttcatcttggtggcaactcctttgcaatgcagctggcagcgacatccttataaaaacatgtgctaaagctctgtcctctgttagaggtgccttttaggaatacggggagtgaaggaaggccggcaggcatctccatgcaactagatgg

SEQ ID NO: 667 - DNA, 1648 bp, Homo sapiens
  CDS (278)..(1099)
gcttcggtgaggccgccgtgggccccatcttccggcggtcgccggagtttgtggtgattgttgctgccgccgccaccgccccggctgccatctcctcctcctgggccgccgcctcctcctcttcctcctcctcctgggccgggctgaacccctccccgctgccgcctcctcctgggctgggcccgcggtgtctcgtcccctcgcggagccgctcctgccgccgccgccgccgcctcctcattcatcctcgtgcaccataggcggcacaggcaccaagatgtccaaccgagtggtctgccgagaagccagtcacgccgggagctggtacacagcctcaggaccgcagctgaatgcacagctagaaggttggctttcacaagtacagtctacaaaaagacctgctagagccattattgccccccggagaattttcatccttgggccttctcatcatgtgcccctctctcgatgtgcactttccagtgtggatatatataggacacctctgtatgaccttcgtattgaccaaaagatttacggagaactgtggaagacaggaatgtttgaacgcatgtctctgcagacagatgaagatgaacacagtattgaaatgcatttgccttatacagctaaagccatggaaagccataaggatgagtttaccattattcctgtactggttggagctctgagtgagtcaaaagaacaggaattcggaaaactcttcagtaaatatctagcggatcctagtaatctctttgtggtttcttctgatttctgccattggggtcaaaggttccgttacagttactatgatgaatcccagggggagatttatagatccattgaacatctagataaaatgggtatgagtattatagaacaattagaccctgtatcttttagcaattacttgaagaaataccataatactatatgtggaagacatcccattggggtgttattaaatgctatcacagagctccagaagaatggaatgaatatgagtttttcgtttttgaattatgcccagtcgagccagtgtagaaactggcaagacagttcagtgagttatgcagctggagcactcacggtccactgaagctctgaatcctcagggatgccacctgcacattctcatactctgtccggggtcccagcctagcctttaccacgatactggtcctggtttggggggattctgaaacctcaaactaatagaactttcttctctttttttctagtaggtgtagtccttccttaatttcaactcattaaaaaatgctttatagtttagggcagtggaaggaaggctggcatcaaaatattttgatcaaaaaagatgacaatgtaaaggctcagttgtggcagacagttttttgaaagtaacttgtaaagcatttaccatatcctaaatttgcactctttgcagacttgtgcacatatattccgctttcagaatagttttgcaaattgtacacaaacaaacaaaaaggtggaagctttttaataaagaaattgcatttataaatgatctgtattagaatataataaatctccagttatagtcaattactacccatgttgtacaacagataccttctattttagttgctaataaagggctacacaactcaaaaaaaaaaaa

SEQ ID NO: 668 - DNA, 3819 bp, Homo sapiens
  CDS (652)..(3336)
gggcgacacccgggccgtgccgccagcgtccgtcgggagagtgaaggctcgcaacgccttgcccgggggaaggtaacgcgccgcgcccggggctgcgcggtttgcaccgccaggccgagggctgggggccagaagacaagagagacggcgaggcgcgctccctgcccggcagcgactcggaggtaggtgatgctctgatgctgctgcctcttatgaattgacgacaggtgcagagagagaataaactgtgtctaagactggaccagagagtgagtgtgctggaagccaccataggaacaagcgacctgtttggcaaggaatacagcatccttctgagagcctcttctcgacactatcccacagaccaggacttcctcatgggaaagagcacttaggatcttgctatcagctgccctaaacttttgctgagccaaaataagactttgatgcagaactgaacaagatatttcatttttgtgtgttttaatcttcctggttgcagtcttagttgttcagccctgagaattttgagccacatttgttgctattatttttgcatgcacttttcaaaatgattgacttaagcttcctgactgaagaggaacaagaggccatcatgaaggttttgcagcgggatgctgcgaggccatcatgaaggttttgcagcgggatgctgctctgaagagggccgaagaagagagagtcagacatttgcctgaaaaaattaaggatgaccagcagctgaagaatatgagtggccaatggttttatgaagccaaggcaaaaaggcacagggacaaaatccatggcgcagatatcatcagagcatctatgagaaagaagaggccccagatagcagctgagcagagtaaagacagagaaaatggggcaaaggaaagctgggtgaataatgtcaacaaagatgctttccttcctccagagctggctggcgttgtagaagagccagaagaggatgcagcaccagcaagcccgagttccagtgtggtaaatccagcttccagtgtgattgatatgtcccaggaaaacacaaggaaaccaaatgtgtctccagagaagaggaagaatccgtttaatagctccaagttgccagaaggtcactcgtcacaacaaactaaaaatgaacagtcaaaaaatggaagaactggtttatttcagacttcaaaagaggatgaattgtcagagtcaaaagaaaagtcaactgtcgcagatacttcaatccaaaagttagagaaatcaaagcagactttgccaggcctttcaaatgggtcccaaatcaaggctccaatccccaaagccaggaagatgatctacaaatcaactgatttaaacaaagatgataaccagtcttttcctagacaaaggacagactccctgaaagcgagaggggctccgagagggatcctcaagcgcaactccagttccagtagcacagactcagaaacccttcgttataatcacaactttgaacccaaaagcaaaattgtgtcacctggcctaaccatccatgagagaatttctgagaaggagcattctttagaagacaactcttccccaaactccctggagccattaaagcatgtgagattctctgcagtgaaggatgagcttccacagagtcctgggctaatccatggtcgggaagtaggagaatttagtgttttagaatctgacagattgaaaaatggaatggaagatgcaggggacacagaagagtttcagagtgaccctaagccttctcaatacagaaagccttcgctttttcatcaatcaacctcaagcccatatgtatcaaaaagtgaaacacatcagccaatgacttctggttcttttccaattaatgggctgcattctcattcagaagttttaactgcaagaccacagtctatggagaattcaccaaccatcaatgaacccaaagataaatcatcagaattaacaaggcttgaatctgtattacccagaagccctgctgatgaactgtctcattgtgttgagcctgagccatctcaggtgccaggtggcagttctagagaccgtcagcaaggttcagaagaagaacccagtcctgttttgaaaactttggaaaggagtgccgctaggaaaatgccttccaaaagtctagaagacatttcatcagattcatcaaatcaagcaaaagtagataatcagccagaagaattagtgcgtagtgctgaagatgatgagaaaccagatcagaagccagttacaaatgaatgcgtaccaagaatttccacagtgcctacacaacctgataatccattttctcaccctgacaaactcaaaaggatgagcaagtctgttccagcatttctccaagatgaggtgagtggcagtgtgatgagtgtttatagtggagactttggcaatctggaagttaaaggaaatattcagtttgcaattgaatatgtggagtcactgaaggagttgcatgtttttgtggcccagtgtaaggacttagcagcagcggatgtaaaaaaacagcgttcagacccatatgtaaaggcctatttgctaccagacaaaggcaaaatgggcaagaagaaaacactcgtagtgaagaaaaccttgaatcctgtgtataacgaaatactgcggtataaaattgaaaaacaaatcttaaagacacagaaattgaacctgtccatttggcatcgggatacatttaagcgcaatagtttcctaggggaggtggaacttgatttggaaacatgggactgggataacaaacagaataaacaattgagatggtaccctctgaagcggaagacagcaccagttgcccttgaagcagaaaacagaggtgaaatgaaactagctctccagtatgtcccagagccagtccctggtaaaaagcttcctacaactggagaagtgcacatctgggtgaaggaatgccttgatctaccactgctaaggggaagtcatctaaattcttttgttaaatgtaccatccttccagatacaagtaggaaaagtcgccagaagacaagagctgtagggaaaaccaccaaccctatcttcaaccacactatggtgtatgatgggttcaggcctgaagatctgatggaagcctgtgtagagcttactgtctgggaccattacaaattaaccaaccaatttttgggaggtcttcgtattggctttggaacaggtaaaagttatgggactgaagtggactggatggactctacttcagaggaagttgctctctgggagaagatggtaaactcccccaatacttggattgaagcaacactgcctctcagaatgcttttgattgccaagatttccaaatgagcccaaattccactggctcctccactgaaaactactaaaccggtggaatctgatcttgaaaatctgagtaggtggacaaatatcctcactttctatctattgcacctaaggaatactacacagcatgtaaaagtcaatctgcatgtgcttctttgattacaaggcccaagggatttaaatataacaaaatgtgtaatttgtgactctaatattaaataagatatttgaacaagctaggaaaattgaatttctgctgctgcttcaaagaaaaagctgccccagagcattaaacatggggtattgttaagaagcaaaatgttcttgtttgccatcatgtgtttcacaccacaattctgtgccacagttaagagggtctggtacccttgcaggacctttgtaggttgtgggaaaaagtcgcagaaagatactcaaagtggagcagggaatggagacagacatcagtgatgataaaaaaaaaaa

SEQ ID NO: 669 - DNA, 1798 bp, Homo sapiens
  CDS (429)..(1556)
ttgctctgaactaaccctctaacccttgggagtctgtgtgcagcagtgatgtgagctgcatccgggctgaaatgggagctcccgctatggcactggctcaaggagctaatctaaagagaaagtattttggggaagacatcttggttgcacccctcattgcatcttgactaattgcttccaactccgggggcttccagggacaatctcattgttcttttctctccaagggtcagccatgttaaccatttgttaatttcttctgaacagatcaagcaaaagtagataatcagccagaagaattagtgcgtagtgctgaagatgatgagaaaccagatcagaagccagttacaaatgaatgcgtaccaagaatttccacagtgcctacacaacctgataatccattttctcaccctgacaaactcaaaaggatgagcaagtctgttccagcatttctccaagatgagagtgatgacagagaaacagatacagcatcagaaagcagttaccagctcagcagacacaagaagagcccgagctctttaaccaatcttagcagctcctctggcatgacgtccttgtcttctgtgagtggcagtgtgatgagtgtttatagtggagactttggcaatctggaagttaaaggaaatattcagtttgcaattgaatatgtggagtcactgaaggagttgcatgtttttgtggcccagtgtaaggacttagcagcagcggatgtaaaaaaacagcgttcagacccatatgtaaaggcctatttgctgccagacaaaggcaaaatgggcaagaagaaaacactcgtagtgaagaaaaccttgaatcctgtgtataacgaaatactgcggtataaaattgaaaaacaaatcttaaagacacagaaattgaacctgtccatttggcatcgggatacatttaagcgcaatagtttcctaggggaggtggaacttgatttggaaacatgggactgggataacaaacagaataaacaattgagatggtaccctctgaagcggaagacagcaccagttgcccttgaagcagaaaacagaggtgaaatgaaactagctctccagtatgtcccagagccagtccctggtagaaagcttcctacaactggagaagtgcatatctgggtgaaggaatgccttgatctaccactgctaaggggaagtcatctaaattcttttgttaaatgtaccatccttccagatacaagtaggaaaagtcgccagaagacaagagctgtagggaaaaccaccaaccctatcttcaaccacactatggtgtatgatgggttcaggcctgaagatctgatggaagcctgtgtagagcttactgtctgggaccattacaaattaaccaaccaattggtgggaggtcttcgtattggcttaggaacaggtaaaagttatgggactgaagtggactggatggactctacttcagaggaagttgctctctgggagaagatggtaaactcccccaatacttggattgaagcaacactgcctctcagaatgcttttgattgccaagatttccaaatgagcccaaattccactggctcctccactgaaaactactaaaccggtggaatctgatcttgaaaatctgagtaggtggacaaatatcctcactttctatctattgcacctaaggaatactacacagcatgtaaaagtcaatctgcatgtgcttctttgattacaaggcccaagggatttaaatataacaaaatgtgtaatttgtgactctaatattaaataagatatttgaaaaaaaaaaaa

SEQ ID NO: 670 - DNA, 3721 bp, Homo sapiens
  CDS (45)..(2246)
atggctgccggggaagttggggcgaggcgggccggggatgcgccatggccatggcccggctgggctcgtggctcggggaggcgcagtggctcgcgctggtgtcgctcttcgtcgcggccctggccacggtaggcctgtacctggcgcagtgggcgctggccagggcgcgaccccagccccagcggcgggcggtggagcctggagaggggccgcgcccggggtccgacgcgctgctctcctggatcctgacgctgggcagctggaggagccagtggcaggcggcctgggtgaccgccctgaacgaggaggccgagaggaaagggggcccacctttcctgtcctttgaggaggacccgcggcagcaggcactggagctggtggtgcaggaggtctccagcgtgctcaggtcggcggaggagaaggtggtggtctgtcacgtggtgggccaggctattcagttcttggtcagcgagacgcctgccttgggtgctggatgccggctgtacgacatgcggctctcccctttccatttacagctggagttccacatgaaggagaagagagaggacctccagattagctggtctttcatcagtgtgccggaaatggccgttaatatccagcccaaagcactgggggaggaccaggtggctgagacaagtgcgatgtctgacgttctcaaggacatcttgaagcatttggctggttctgcctctccatcagtggttctgattaccaagcccacgactgtaaaggaagctcagaacttacagtgtgctgcatctactgctcaggaatcctgtcctcctaaacctccaagggctcacgagctgaagctactggtgaggaacatccacgtcttgctgctcagcgagcccggtgcctcaggccacattaatgcagtgtgcgtcgtgcagctgaacgatcctgttcagaggttctccagcaccctgacgaaaaacactccggacctcatgtgggaagaggaattcaccttcgagttgaatgccaagtcgaaggagttacacctgcagatttcagaggctgggcgatcctcagaaggtctgctggcgacggcgacagttcctctggacttatttaagaagcagccttctgggccacagagcttcacgctgaccagcgggtctgcctgcggcagctcggtgctgggctcggtcacggcagagttctcttacatggaacctggtgaattgaaatcctggcccatccctccccctgttcctgctgcaaaaatagaaaaggaccgcacggtgatgccctgtgggactgtggtcactactgtcactgctgtgaagaccaagcctcgcgtcgacgtggggagggcatccccgctgagctctgattctccggtgaagactcccatcaaggtgaaggtgatcgagaaggacatctctgtccaggccatcgcctgccgcagcgcccccgtcagcaaaacactctcttcttcagacacagaattgttggtgttgaatggttcggatccagtggctgaagtggccattcgacagctcagtgaatcttcaaagctgaaactcaagtcgccacggaagaaaagcactattatcatatcagggatctccaagacctcactatctcaggaccacgacgctgccctgatgcagggctacacggcctctgtggacagcacccaccaggaggacgccccatcccatccggagagggcggcagcctctgccccgccagaggaagccgagtcagcccaggcatcccttgcccccaagccccaggaggacgagctagactcctgggacttggagaaggagccacaggccgcggcatggagcagccaggtcctgctggaccccgacggtgatgagctgtcagagagctccatgagtgtcttggagccgggcactgccaaaaagcataaagatgaggagcatggccgctgcctgcgcccacctgactccaccattcgggggacaaaaggacatcttggtgcagaagacaggactgggggcaaggcaggccaagccgtgagctcaggaggaattctaaggaaaggtgcaaagctgttcttccgccggcggcatcaacagaaagacccaggcatgagtcagtcacacaatgaccttgtgttcctggagcagccagagggttcccggaggaaaggcatcaccctcaccaggatcctgaacaagaagctgctctccaggcacagaaacaagaacaccatgaacggtgcccccgtggagccctgcacgtagggcctgaggtcatcacctccaagccagaagacgtgcacccatgttaactaccctcaccaggacgcagccagtgtgtccgccggatgtccagatgccccgcttgtcttgctgggtttcttccaaccatctcgtcatttaaagggaaaacaaaatctgagtctccagccaggaggcttctcccagagaggacaaaaaagcccaacttgccaccagatgctaaatgagacttgacagctgcagagcttgggctgtgctcatagctaagggttagggttcaatattagaaggagattaacattataagtgaaataatatgctctaatagattgtggagggcaggtttgagggacttagtttacctattctacactaacaagtgttgttttgggtccatgcctggaccatgtcacaaaaaggaggtgcccccctgtgctgtcactgtgaatggaaaggatgggtcacctctcttcatctgctgcttggaataaaaaatgcagctggccctgagtacagggaagtggaacataggcaggattttggattaatagagaaattttgataagaatggagacgctacgacagatgtaggaagtcatctacctttgatattagccatagaacttgaacactaactatatcctatgcatagtatgcagaacacttttctaagtttactttgagcctacttgcaagtggaagatatatatattctcacatggtttttacatttttctctatcgtgttaaaagctctaataatgctagtggagcagttgacatccagggttttttttcctgcctgtcatacttgctaaacaagagcacagcgggcctgtcagatgaagtcaggagccatacgtgaccgctcgtagaacacagtaaccaaacacatacatggattttgccaagtgctgccagtagccaaaacaaagtctttttagggcaatagaggaaattattttgtgtctcaggtgtcagtcttaggaatggaagtttaataacaaatgggccaaactcgcaggacattccttctatgagcgcttcagaattttgctgtgaacagtcctcttggacacaggttggggtgcccttgtttgggtttgttttggtggaaaacatcacaaacctggcacaccatttgaatatccctaatatcattccagtcgctttcctcatcagttgcctttctatttcagttcattcacagatctcacttctgaatgtgccacttccagtagacatgctggtcaaagagcagtcatcattggggtgaagtgttcttgacagtttaatatgattcacttttctccaaagacatgtaaaaggctgttacgaaagcttggcttctgtcatggagacggaaatgggcaagcttccttccgtagcctcttgttaatccttaaacattaaatatttcgggggtaatagagccactggtgagtaaaaacctatataaaaaccaaaattatagga

SEQ ID NO: 671 - DNA, 2024 bp, Homo sapiens
  CDS (117)..(1673)
gtgtctgggccagcaggtcgcagccggagctgtgcagctggctgctgtcacatcccttcctctcccagctgccttcagctgagcttaacgccagcagaggccgaaacacttcacaaatgcaacttgtcagctgggagacggcttccctgagttctgacactgttctaggagtaggaatcattatcccacgctatggagaaggaaaccaaggccaggtaaagttatgtagggcgcttaaagttgcagagccaggaataaagtccggattgggactcagacacagccgctgtcgctgccatctggcgcgccgcagactcccgagaacagccctggctgtcagcgggcaccagccgcttcctgtgcccatcgcggagactggaggggcgcaccacggccaccgagccagaggcgcttcaggaggcaagagaagtccccgcgcgctccgggacccggcgcagctcatggtgagcgccctctggggctcgagggtcccttggctgagggggcgcatcctcggggtgcccgatggggctgcctgggggtcgcagggctgtagttgggatcgcgcacaaaccgactctgcggcccagcccgaaatgctgccgccaaggagcaacggcaccgcgtacccggggcagttagcgctataccagcagctggcgcaggggaacgccgtggggggctcggcgggggcaccgccactggggcccgtgcaggtggtcaccgcctgcctgctgaccctactcatcatctggaccttgctgggcaacgtgctgatgtccgcagccatcgtgcggagccgccacctgcgcgccaagatgaccaacgtcttcatcgtgtctctggctgtgtcagacctcttcgtggcgctgctggtcatgccctggaaggcagtcgccgaggtggccggttattggccctttgaagcgttctgcgacgtctgggtggccttcgacatcatgtgctccaccgcctccatcctgaacctgtgcgtcagcagcctgaatcgaacctacgccatctcttcctcgctcatcaacttctacatccccatggccatcatgatcgtgacctacacgcacatctaccgcatcgcccaggtgcagatctgcaggatttcctccttggagagggccgcagagcacgtgcagagctgccggagcagcgcaggctgcacgcccgacaccagcctgcggttttccatcaagaaggagaccaaggttctcaagaccctgtcagtgatcatgggggtcttcgtgtgttgctggctgcccttcttcatccttaactgcatggtccctttccgcagtggacaccccaaaggccctccggccggcttcccctgcgtcagtgagaccacattcgatgtcttcatctgtcactatgccttcaacgccgacttctggaaggtgtttgcccagctgctggggtgcagccacgtctgctcccgcacgccggtggagacggtgaacatcagcaatgagctcatctcctacaaccaagacatggtcttccacaaggaaatcgcagctgcctgcatccacatgatgcccaacgccgttccccccggggaccaagaggtggacaacgatgaggaggaggagagtcctttcgatcgcatgtcccagatctatcagacatccccagatggtgaccctgttgcagagtctgtctgagagctggactgcgagggggagatttctttagacaaaataacacctttcaccccaaatggattccattaaactgcattaagaaaccccctcatggatctgcataaccacacagacattgacaagcatgcacacacaagcaaatacatggctttccagtactgctccctttatcatgtgtttctgtgtagtagctggtgtgcttagaaacctcaccccattgattgatagttcaaagaattggcagaagcagttgcaataaactcagtcaaatgtacccagcctaccagagatggaacaatgatcctgtgagagaagagagtatggtgctggctccttaaaaaaaaaaaa

SEQ ID NO: 672 - DNA, 1109 bp, Homo sapiens
  CDS (237)..(1106)
tttttcctttccttttccctttctcctttccctctccatagtgaagctaatgtactttgcacagtgttagcaattatcacccattcatcaggtattaattcatttcgatcccaagggcataggcttgatgtacaataaggagttaaggactgtgagttctctgataaggtttggttatagtcatttctcacttctcaccctctccaggactacttccagcaacccagtctcctgccatgtccgaccccatcacgctgaacgtcggggggaagctctatacaacctcactggcgaccctgaccagcttccctgactccatgctaggcgccatgttcagcgggaagatgcccaccaagagggacagccagggcaactgcttcattgaccgtgacggcaaagtgttccgctatatcctcaacttcctgcggacctcccaccttgacctgcctgaggacttccaggagatggggctgctccgcagggaggccgacttctaccaggtgcagcccctgattgaggccctgcaggagaaggaagtggagctctccaaggccgagaagaatgccatgctcaacatcacactgaaccagcgtgtgcagacggtccacttcactgtgcgcgaggcaccccagatctacagcctctcctcttccagcatggaggtcttcaacgccaacatcttcagcacctcctgcctcttcctcaagctccttggctctaagctcttctactgctccaatggcaatctctcctccatcaccagccacttgcaggaccccaaccacctgactctggactgggtggccaatgtggagggcctgccagaggaggagtacaccaagcagaacctcaagaggctctgggtggtgcccgccaacaagcagatcaacagcttccaggtcttcgtggaagaggtactgaaaatcgctctgagcgatggcttctgcatcgattcttctcacccacatgctctggattttatgaacaataagattattcgattaatacggtacagaggaagattcacggcccctgaggagatccagaggaaagagacggtctccaagggtgctgtgcagcaaggagcccaggagtggtatgaaccgtaa

SEQ ID NO: 673 - DNA, 1805 bp, Homo sapiens
  CDS (358)..(1212)
ggtggggacttccttccatgtctgtttcctggatgcggtattctcgtctggaggaaaaagctctttgacctcatggcgctttcccgagccgcagtgacgtcattaaatgctcacgcgtcacagcccaatcatagggccctttccctccctttagaagtcccgactgtccctgacacattccactccaagcgagccgcgacacttacgtcacgctccgcccgcccgcgcggtgatgacgtcacgactcagggctggcgtcacgctgtcccccgcggggggcgcccttgagggcggcgcttccggatcgcggagcctggtggccgcagcggcggtggcgacgacggccgagacgtggggatggcgggcgccgggagcgaagcccggttcgccgggctgtcgctggtgcagctcaacgagctgctggaggacgagggccagctgacggagatggtgcagaagatggaggagacacagaatgttcagcttaacaaagaaatgacacttgccagcaaccggagcctggcagaaggaaaccttttgtaccagccccagctggacacgttgaaagcacgcttgacccagaaataccaggaactccaggttctctttgaagcctatcagataaagaagaccaaattagacagacagtctagcagtgcttccttggagaccctgttagcacttcttcaggcagaaggggccaagattgaggaagacactgagaacatggcagagaagtttctggatggagaacttcctctggattccttcattgatgtctatcagagcaaacggaaactggcccacatgcgacgggtgaaaatcgagaagctccaggagatggtcctaaaggggcagagactcccacaggccctggccccgctgccccccaggctgcccgaactggcacctaccgccccccttccctaccctgccccagaggccagtgggcctcctgccgttgcacctcggcgcatcccccccccaccacccccggtgcctgcgggacgcttagccaccccgtttactgcggccatgagttcgggacaggccgtgccgtacccaggattacagtgcccgcccctgcccccccgcgtgggcctccccactcagcaaggattctcttcgcagttcgtgtccccatatccgccacctctccctcagagacccccgccccggctccctccacaccagccgggtttcatcctccagtgagcgccggcgcggtccttcccgggagacttcttccacctggcgtgttgtgctctgctcacgggaaggaggctggaggtccgctctgtgccaagggctctggggccctgggccagcgtgtctgtctgattttagaactgtaggtcagtggtgagtagtaggagcccaggctttgggcatcaaggcagttgtgtgtgccgggttacagcctgacacctgtgcgttgcatcggtttgcattatccgtgtgatttctaagtatcttagcgttgatgaactcatgtttgggaagaaataggcctctcccgcagtcccatttagaatcgtggtccttctgttgcagctttatttaatgagcatggttcatgatacttattttattttcgaaagacagtcctatgtgtctccgcaccggccgctgtcggggatgccacagccttccacggtcgcagccagacgtgagcttggcattgaagttgcaaacgcgcccctggccgggctcgccgtcgctgtccagggccgtgtccggtgctgtggctgtaaagctgtaggaccctttttaataaatagagaggtattaataaaaaaaaaaaa

SEQ ID NO: 674 - DNA, 390 bp, Homo sapiens
  CDS (37)..(303)
tttcctccttaataaaaccagaccctttgacatgaaatgactagacccctgcctctctctccagcctctccactggccactgctgccatagaatcttatgctcccaccatgccaaatttcttgtggttccctaaatgcgccatgtttgaagatactctgaggacattgtatatacttttgttctacctgagatacatttgcttactttctccacatattgccctcatgacacttatccttattgatggatttcttcaatgctactattgtgccttacatgtgccttgtattatagcatttttatagcatttctcacccaattgtggctattttgttacatgtctgtctccttggggggactgtgaactctgtcataacagatgccatttt

SEQ ID NO: 675 - DNA, 1832 bp, Homo sapiens
  CDS (62)..(526)
cggacgcgtgggcggacgcgtgggtcggtgcttggcctcgcccgcaacaccctcctggaggatgctggtgagaggcagggaccaggggtccggctcccggctcgggcctatcgttaggcgctgggcccccaggccctctcctttgcagagtctcgctgcctccctcgacgcagagccttcaagcgccgcagtccccgacggcttccccgcgggccccactgtctccccaagacgcctggcgaggccgccggggctggaggaggcgctgagcgcgctggggctgcagggagaacgcgagtacgccggggacatcttcgccgaagtcatggagtacctgggtctggctggtgacacactttatctggcggttcacctgcttgattcctacctgagcgctggccgcgtgcgtctacatcgcctgcagctgctgggcgtggcttgcctgtttgtggcgtgcaaaatggaagagtgcgtgcttcccgaggaaactgaggtccggaacttggggcctttccagggcagggagtaaagagcccggatccaagactccttcacctccccccgcatcccccatctgcagcccgccttcctctgcctcctgagcgcggactccttctcacgggcggagctgctgcgcgccgagcgtcgcatcctgagccgcctggatttccggctgcaccaccccgggcccgctgctgttgcctccgggctgctggccgcgctggcagggagcagcccccaggtgatgttacttgccacctacttcctggagctgtctttgctggaggccgaggcggcgggatgggagccgggtcgtcgtgcggctgcggctctgagcctggcgcaccgcttgctcgacggggcgggctccaggctccagccagaactttacaggtgtagtcttggcggaggaagtgtatggggtcaccgcagcttcagggacttaccttcctggtcatttttacggtctcggagaatgagagacaattattgaggaggaggtggcacctagacttgatttttctgggtgtgggagagaatggggtgggaggacccccattagtccagatctggggtctcttaaccttgccccagagtggaagatagtctcccaggcccagaagatgctcctattgccttccagggctgagaacgaaggatcacccaggcctcgagtcctccatctctgtatctggtggtggatggggtgttcctttagctgctagggccgctaaccatgctaccaggtggcagggcgaaccatggtttccctcagcctgtgcacccagcatagagaggatggctgcccatcctcagctcccctccttgcttcctcgagtgttctgactccgcactagccgcgccctgtaggaagaatagggtgtccacctctccccggtgctcgcctagtcactccagttgaagacgggacgcgtgcccgatctcaagagagcccccgacccgtccgtggggaaccacatcgacgcttcttctcagcctccagtctccagttccaaggatgggtcatctccaaccacttgccctgcctcagtttctccatctccctgctgcagccccgaggaactgggcaccctcgagccgtgcatggcccgcgctgcgctccgaggtcccgcgccgggtcgcgccgcagtcttcctcaagtatgcgcggccccagcgccagggggccagccttgccgccgcctgcctgctccgccgcctccagtctgagcctccctgagtactgggactcagtcacaaaaaaatcaacaacaaaaaacaaaaccctcccagtgtgtgtccgtctctcatctcaataaaagaatttatttt

SEQ ID NO: 676 - DNA, 865 bp, Homo sapiens
  CDS (186)..(695)
tggcacgaggcctcgtgccggaaaactgaggcctgggagcaggaacctgtaggcagcgcttgagggtagcgggatagcagctgcaagcgcgcgtgggaggcgggggctctgggcggaacaaaaatcacaggatgtcagaggatgtttcccgggaagaactgggataaaggaagggtcccagcaccatggaggacccgaaccctgaagagaacatgaagcagcaggattcacccaaggagagaagtccccagagcccaggaggcaacatctgccacctgggggccccgaagtgcacccgctgcctcatcaccttcgcagattccaagttccaggagcgtcacatgaagcgggagcacccagcggacttcgtggcccagaagctgcagggggtcctcttcatctgcttcacctgcgcccgctccttcccctcctccaaagccctaatcacccaccagcgcagccacggtccagccgccaagcccaccctgccggttgcaaccactactgcccagcccaccttcccttgtcctgactgtggcaagacctttgggcaggctgtttctctgaggcggcaccgccagatgcatgaggtccgtgcccctcctggcaccttcgcctgcacagagtgcggtcaggactttgctcaggaagcagggctgcatcaacactacattcggcatgcccggggggagctctgagtgcagcttaagcctctccacggtgacgggtggctctgtggctggtaggactcacccatgatatggggtgcaggaactctgggggccctgaaggatttgcttccctcccctgggaaggcagagggctcttaataaagaggacccagaagattcttaaaaaaaaaaaa

SEQ ID NO: 677 - DNA, 1359 bp, Homo sapiens
  CDS (38)..(1054)
agttcggccgcttcctcttggcgggtgggctgcagctatggagggcgagcctccacctgtggaggagcggcggcggctgcaggaggagctgaacgagttcgtggagagcggctgccggacgttggaggaggtgaccgcgtccctgggctgggacctagatagtctggatcccggggaagaggaggcggcggaggatgaagttgtgatatgtccatacgattccaatcatcacatgcctaaatcatctttggcaaagcacatggcatcttgtagattgaggaaaatgggctataccaaagaagaagaggatgaaatgtataatcctgagtttttctatgaaaatgtgaagataccttcgattactttgaataaggactcacaattccagataattaaacaagctagaactgcagttgggaaagacagtgattgttataatcaaagaatttattcttcattgcctgttgaagttcctttgaatcacaaacggtttgtttgtgatctaactcaagctgatcgtcttgccctctatgatttcgtagttgaggagacaaagaaaaagcgctctgattctcaaattattgaaaatgacagcgatctctttgtagacttggctgccaaaatcaatcaagacaatagtcgaaaaagtccaaaatcctaccttgaaatcctggcagaagtacgagattataaaagaagacgccagtcctatagagccaagaatgttcacataaccaagaaatcatatactgaggtgattcgagatgtgataaatgtgcacatggaagaactcagcaatcattggcaagaagagcaagagaaggcagaggatgatgccgaaaagaatgaagaaaggcgatcagcttcagtagattcacggcagtctggtggaagctatttggatgctgagtgttcacgacatagaagggataggagtagaagcccacataaaagaaaaagaaacaaagataaggataaaaactgtgagtcgagaagaaggaaagagagggatggggaaagacaccatagtcataaaagaagaaagcaaaaaatataaatgaagtactcgtacctatattaattatgcttacgccatgataaccaatatacagatatattaattggaattcctttgcataggagaatgtttttatgatctgtttagggcttattattttttttatgatctgtttagggcttattattttccagtaaatatgcttcaaaccatgagtacactattaggccctacaactttgttttccttatattttattagatgatttgcttcctataactgatgttgttttgttcgttttgctaatatatgtatctcaaaattctttaagtcaatattta

SEQ ID NO: 678 - DNA, 2450 bp, Homo sapiens
  CDS (292)..(2199)
caatggcaatcttggtataagttgattgaagagggtatttattaaggttctggcatctagggcaaagtatgagctcatcttttacagaaagacattgttccttctactgttcattctaatcagagactctactagtctgtgtttgggaactgtagttcccatgatttctttaaatgtgtaggttagtattctttttaattttaaaaaattatttactgttttggtttataggaactttgcttacataccaagctgttagccccagttaattgtcccattgctgattttcttatgaaagctcctgaacctccaccagctttaattgtaagaaatgctgtacaaatgcttaagacaatagatgcaatggatacatgggaagatctgactgaacttgggtatcatttggctgacttgccagtagaaccacatcttggtaaaatggtcttgtgtgctgttgttttaaagtgtctggaccccatccttacaattgcttgcacactagcttatcgagatccttttgtactacctactcaggcctctcaaaaacgtgcagctatgctttgtaggaaacgttttactgcaggagctttcagtgaccatatggcacttctcagagcattccaggcctggcaaaaagcacgaagtgatgggtgggagcgagccttttgtgaaaagaattttctttcacaggctactatggaaataatcataggcatgagaacacagttgcttggtcaacttagagcatcaggttttgttagagcacgaggtggtggtgacattcgggacgttaacacaaactctgagaattgggctgtcgttaaagctgcattggtggcaggcatgtatcctaatttagtccacgtggacagagagaatctagtgttgacagggccaaaggagaaaaaagtacgatttcatcctgcttcagttctcagtcagcctcaatataaaaagattcctccagccaatggtcaagctgcagcaattaaggcactgcccacagattggcttatttatgatgaaatgaccagagcccatagaatagctaatattagatgttgttcagcagtgacgcctgtcactatattggtattctgtggaccagctagattggcaagtaatgctcttcaggaaccttcatcctttagagtggatggcattcccaatgacagtagtgatagtgaaatggaggacaaaactacagctaatttggcagccttgaaacttgatgagtggctccatttcacactggagccagaggcagctagtttattgctgcagctcagacagaagtggcatagcttatttttacgccgaatgagagctccatctaaaccttggtctcaagttgatgaagctaccataagagcaattatagctgttttaagcactgaagaacagtctgcaggtttacaacaaccatcggggattggccaaaggccaaggcctatgtcttcagaagagcttcctttggcctcatcttggaggtcaaataatagtaggaaaagttcagcagatactgaattttctgatgagtgtactactgcagaaagagtactgatgaaatctccatctccagcattacacccacctcagaagtacaaagatagaggaattttacatcctaaacgaggtactgaggaccgatcagatcagtcttctctgaaatctacagacagcagtagttacccaagtccttgtgctagtccttctcctccatcctcaggaaagggctcaaaatctccttcgccaagaccaaacatgcctgttcgatacttcataatgaagagtagcaatttgagaaaccttgaaatttctcaacagaagggtatctggtctacaactcctagtaatgaacggaagctaaatcgagccttttgggaaagcagcatagtttacttggtattttctgttcaaggatctggacatttccagggattttctaggatgtcttctgagattggaagggaaaagagtcaggactggggctctgctggactaggaggagtatttaaggtggagtggatacgaaaagaaagccttccctttcaatttgcacaccatttactcaatccatggaatgacaacaagaaagtgcagataagcagggatgggcaggaactagaacctctggttggtgaacagttgctccagttatgggaacgtcttcccttgggagaaaaaaacacaactgattgacactcagaactcttagctgtggaagaacatcatgcctatttataaccactgaatgcactgactttcaaaaactgaggtggggtgtgtgttacgaatgggctttttaacacttttagagtgttgctttagaactaccatcttcatatacaggagaaaggaagcatttaaatttttatagtgattatagagaatgattatatgatgtttgtaatgaataaaatagtagtttcattattaaaaaaaaaaaa

SEQ ID NO: 679 - DNA, 1123 bp, Homo sapiens
  CDS (49)..(873)
gagcgtgggactctgcggacatagaggtcacagacagtcgcctgcctcatgccactattgtggatcaccggccccaggtaccatctcatccttctatcggaggcctcctgcctcagggcaaactatgtacacctgtgtcctttattccagcaccgttggttagagacatgtaacgcacctccccaattgatccagggtaaggcacgtagtgctccgaagccatcccaggcctctggtcatttctctgtggagctggttcgcggttacgcaggctttggcctcaccttaggtgggggccgggatgtagctggggacactccgctggccgtgcgcgggctgctgaaggatggcccagcacagcgctgtggtcgtttggaggtcggggacctcgtgctccacatcaacggagagtcaacgcagggcctcacccatgcccaggccgtggagcggatccgagctggaggcccccagctccacctggttattcgtcggcctctggagacccaccctggcaagcctcgaggggtgggagagccccgaaaaggagttgtcccgtcatggccagatcgcagcccagatcctggagggccggaggtaacggggtctcgcagcagcagcacttccctagttcagcaccctccatcccggacgacgctcaagaagacccggggcagcccggagcctagtccagaggcggccgccgatggccccacggtttctcctcctgagcgccgcgctgaggatcccaacgaccagatcccgggttccccggggccctggctagtgcccagcgaggaacggctctcgcgggccctaggggtccggggggcagcgcagctcgctcaggagatggcagccggaaggcggagacactgagcctacctctgacagcgcggggctcactagttaccgcccaacctggatccggcgcgtgtggccgctgggcacttggcacctccccaagagcttccacttggtttggtccccccacccgctgctcagtggctctgaccacactcccctcgcagcgtcagtggtacgacccttccagccggctagcctgcgcttctggttctgggagggggaggtaataaaatggttcgatccggtaaaaaaaaaaaaa

SEQ ID NO: 680 - DNA, 1560 bp, Homo sapiens
  CDS (81)..(1313)
cggaaccgtaggaggggtacttaaccggacggcctaccaggcctgtggccgtgcgcgggaagagcactgcagatctcaggatgatggggcgcagccctgggtttgccatgcagcacatcgtgggtgtgccccacgtactggttcggaggggcctccttggaagggacctcttcatgaccaggactctctgcagcccaggcccaagccagcccggagagaaaagacctgaggaggtggccctggggctgcaccaccgcctcccagcactgggaagagccctggggcacagcattcagcaacgagcgacctccacagccaagacttggtgggacagatatgaagagtttgttggactcaacgaggttcgagaggcccagggaaaggtgacagaggctgagaaagtgttcatggtggctcgagggcttgtccgagaggctcgggaggacttggaagttcaccaggccaagctgaaggaggtgagggaccgcttggaccgtgtctccagggaggacagtcagtacttggaactggctactctcgagcacaggatgctgcaggaggagaagaggcttcgcacagcctatctgcgtgcagaagactctgagcgagagaagttctccctcttctctgcagctgtgcgggaaagtcatgagaaggagcgcacaagggctgagaggaccaagaactggtccctcattggctcagtcctgggggccctgattggtgtggctggctccacctatgtgaaccgtgtgcgactacaggagctgaaggctttactcctggaggcgcagaaggggcctgtgagtctccaagaggccattcgagaacaggcgtctagctactcccgccagcagagggacctccacaatctcatggtggacttgaggggcctggtacatgctgctgggccagggcaggactctgggtcacaggcaggtagtcccccgaccagagacagagatgtagatgtcctttcagctgccttgaaagagcagcttagtcattccaggcaagtccattcatgtctagaaggcttacgagagcagcttgatggcctagaaaagacttgtagccaaatggctggggtggttcagcttgtaaagtctgcagcacacccaggcctggtggaaccagcagacggggctatgcccagcttcttgctggagcaggggagcatgatcttggcactgtcagacacggagcagagactagaagcccaagtcaacaggaacaccatctatagcaccctggtcacctgtgtgacatttgtggccacactgcctgtgctctacatgctattcaaagccagctaacccctggcccctcctccagagggtctgaggcaatagctgtgaatgtggatttaagtagagaatcgtagcaatgaagcgagcctttgggggcatgtacaacctcaatctgaaggagcagtatctgtgtggctcaccagcaggcatgcttcgctttgtagacaaggttcatttacattaattatcaaaactttgtgctaatgtccaattaaaatatcctgagttttattatttaaaaaaaaaaaaa

SEQ ID NO: 681 - DNA, 1821 bp, Homo sapiens
  CDS (266)..(1261)
aaggatccttaattaaattaatccccccccccccaggcggcggcaccgcgcgggacggagcttggctgttggtcggtgggttcccgtgcggcggcggccaaggaggaggagacacagttggagcagctccgtgggctgactggggcgaggcctcagcagcgcgagcttgagtgcggccgagcctgcggcgccttcccctgcgggtggggacgagcgggccccgcggcgtcatcggcggcgaggagccgccgcgcctcggcctagcatgtcggaagcgggcgaggagcagcccatggagacgacgggcgccaccgagaacggacatgaggccgtccccgaaggcgagtcgccggccggggctggcacgggcgccgcggcgggggctggaggcgcgaccgcggcgcccccgagcgggaatcagaacggcgccgagggcgaccagatcaacgccagcaagaacgaggaggacgcgggaaaaatgttcgttggtggcctgagctgggatactagcaaaaaagatttaaaagactattttactaaatttggagaggtcgttgactgtacaataaaaatggatcccaacactggacggtcaagagggtttgggtttatcctgttcaaagatgcagccagtgtggagaaggtcctagaccagaaggagcacaggctggatggccgtgtcattgaccctaaaaaggccatggctatgaagaaggacccggtgaagaaaatcttcgttgggggtctgaatcctgaagccactgaggaaaagatcagggagtactttggcgagtttggggagattgaggccattgaattgccaatggatccaaagttgaacaaaagacgaggttttgtgtttatcacctttaaagaagaagaacccgtgaagaaggttctggagaaaaagttccatactgtcagtggaagcaagtgtgagatcaaggtggcccagcccaaagaagtctatcagcagcagcagtatggctctgggggccgtggaaaccgcaaccgagggaaccgaggcagcggaggtggtggtggaggtggaggtcagagtcagagttggaatcagggctacggcaactactggaaccagggctacggctaccagcagggctacgggcctggctatggcggctacgactactcgccctatggctattacggctacggccccggctacgactacagtcagggtagtacaaactacggcaagagccagcgacgtggtggccatcagaataactacaagccatactgaggcggccaagggagcgaccaactgatcgcacacatgctttgtttggatatggagtgaacacaattatgtaccaaatttaacttggcaaactttctattgcctgtcccatgtgcatcttatttaaaatttcccccatggaaatcactctcctgttgactatttccagagctctaggtgtttaggcagcgtgtggtgtctgagaggccatagcgccatcatgggctgatttttattaccaggtcccccagaagcaagtgtgaggctctgcttcctgctgccgctctgcagcctggacctgtggaccctggttgtaaagagtaaattgtatcttaggaaaccagtgtcacctttttttcaccttttaattttatattatttgcgtcatacatttcctgtaacggaagtgttaattttactgtactttttggtaccttttgggaatctaatgtattgtaaggtattttacacgtgtcctgattttgccacaacctggatattgaagctatccaagcttttgaaataaaatttaaaaacccccaacatataaaaaaaaaaaa

SEQ ID NO: 682 - DNA, 1326 bp, Homo sapiens
  CDS (1022)..(1297)
accaattttacctatcttttcttctaaactgaacagtcagagagacagctcctggctttagcttcttgtggtaccacgcactttgagcactttgtgcgtatcatgcaatatacttgcaatacacagaacaaatttcaaatacgcctcacttttagacttagaagagaaacattaaaacttaagggtgtaaggagggatcaagaaacttgataaggtcaaaagcaataatctctctgacatattccaggctcttacactgagaccaaagagaaatctttacctcagtttcttcatcagcagaatgggtttctggcctctctcagggataattttgaaggcataatgaaaattatgatgaatcactcattggtaggaaaataatgatataagtttcaaatatgtatgattttacctatacttggtaatgctttgttttatagagcctgttaagctgctattgatagtcggagcttatatactgtgacttctgaagactatacatgaattccacaatcagtgctttgttgatacaaaatccttaaaagggaggcactttaaagaatatgtatttttcacttttcttaatatgtttcatcggtgacaggcatgataatatttctatatgtaatgggtaattgggaaaaaatagatgataaataaaattgctctaaagaagttaaaaaactgaatgaacagctaatactggtataaagtaactaatgtttggagccaacatttgttccttgtgtcagcaaaaggatattcacattccatgatccctggctgagaattctgcctctagtctttcttacccagctgttgtctatccttgttcaattataaatactgctaagggcatttttaaaatacgatcttgtagtccttaaatttgaatccgtcagcacggtcactcataggaaaatgatcaaacaagcaagccagtcatgatttgactccttcccatctcatttcttactgccttacgctcatcctgaggtccaccttggtctctaaaaacaccatgtgttctcatgcctccatgtcttttcacacactgttccatttgctcttcctcccacattacattgaaactttcaagcctcagtcgaaacattgcttcttctggatagcagccttcttgacatccctcctcactccccagtccctacagggcttccatagctctttgtgtgcacttcgatcccagcattttccatcgacttgtaattgtttctgctacctgacaatcatcgccttgagtactgggacaacctttgattactcattatatcctcaataaatatttgttgaactaaaaaaaaaaaa

SEQ ID NO: 683 - DNA, 1656 bp, Homo sapiens
  CDS (321)..(809)
tttcgtcttataccaaacacatcaaactccaaagaaaaagaacattgcccgagagagagaaacagcatctataagcggcattaaaacacaccaaggaggagacggaacttttcgcctcattgtaacacacattctacgcctagcctggctttcttgctctccctcatctcattgtttcagcggaggccaaatctgaagtcctttccagggagtggctctgttcatcttattcgccagccaaagtaggaacagcgtaagaggagagagacacattcagcagccaaaggactcggtggaaagagcagaacaccatagacaatatgtcgctcttgggacccaaggtgctgctgtttcttgctgcattcatcatcacctctgactggatacccctgggggtcaatagtcaacgaggagacgatgtgactcaagcgactccagaaacattcacagaagatcctaatctggtgaatgatcccgctacagatgaaacagttttggctgttttggctgatattgcaccttccacagatgacttggagtgctgggatgagaaatttacctgcacaaggctctactctgtgcatcggccggttaaacaatgcattcatcagttatgcttcaccagtttacgacgtatgtacatcgtcaacaaggagatctgctctcgtcttgtctgtaaggaacacgaagctatgaaagatgagctttgccgtcagatggctggtctgccccctaggagactccgtcgctccaattacttccgacttcctccctgtgaaaatgtggatttgcagagacccaatggtctgtgatcattgaaaaagaggaaagaagaaaaaatgtatgggtgagaggaaggaggatctccttcttctccaaccattgacagctaacccttagacagtatttcttaaaccaatccttttgcaatgtccagcttttacccctactctctactttttcacccaaactgataacatttatctcattttctagcacttaaaatacaaagtctatattattgcataattttgctgcttctcaatatcatagacacagtgaatagatgatgactatatggcttatatacaaacattctatgtacaatttcaagggagactaaactttaggctaataatctttactattgaatctgtctgatatagatcttagggttgaagaagctatctttgtctatttgggctaaccatagaatttcatttattttcctcacaatattttcctagaccaactccccatcattcacgtgttcctctttactcttactttaactattttgctggcttgcccgaaaatttgcctggcaagtcttccttataagacacatcatggtaagttttgtagtcctgtaagattctgcaacacagtcaagaattatacaatcctactagcaatatataaggacccaaaatgtcttctgctaagctcagaggctggggctaaagcatgaggactatgccagctatagaacttggactcataattcgctatccaatttttcatgcagttgtctagtcgggaagtaaggttggaaactaagtctcatttactgattcgtttatgggtagtaccgggatgaacccaccaccacaaagcaaattagacaacttaatgtgaaatcataaaaaaaaaaaa

SEQ ID NO: 684 - DNA, 1557 bp, Homo sapiens
  CDS (16)..(798)
attcttccggtggagatggctgcggccgtggcggggatgctgcgagggggtctcctgccccaggcgggccggctgcctaccctccagactgtccgctatggctccaaggctgttacccgccaccgtcgtgtgatgcactttcagcggcagaagctgatggctgtgactgaatatatccccccgaaaccagccatccacccatcatgcctgccatctcctcccagccccccacaggaggagataggcctcatcaggcttctccgccgggagatagcagcagttttccaggacaaccgaatgatagccgtctgccagaatgtggctctgagtgcagaggacaagcttcttatgcgacaccagctgcggaaacacaagatcctgatgaaggtcttccccaaccaggtcctgaagcccttcctggaggattccaagtaccaaaatctgctgcccctttttgtggggcacaacatgctgctggtcagtgaagagcccaaggtcaaggagatggtacggatcttaaggactgtgccattcctgccgctgctaggtggctgcattgatgacaccatcctcagcaggcagggctttatcaactactccaagctccccagcctgcccctggtgcagggggagcttgtaggaggcctcacctgcctcacagcccagacccactccctgctccagcaccagcccctccagctgaccaccctgttggaccagtacatcagagagcaacgcgagaaggattctgtcatgtcggccaatgggaagccagatcctgacactgttccggactcgtagccagcctgtttagccagccctgcgcataaatacactctgcgttattggctgtgctctcctcaatgggacatgtggaagaacttggggtcggggagtgtgtttgtcacttggttttcactagtaatgatattgtcaggtatagggccacttggagatgcagaggattccatttcagatgtcagtcaccggcttcgtccttagttttcccaacttgggacgtgataggagcaaagtctctccattctccaggtccaaggcagagatcctgaaaagatagggctattgtcccctgcctccttggtcactgcctcttgctgcacgggctcctgagcccacccccttggggcacaacctgccactgccacagtagctcaaccaagcagttgtgctgagaatggcacctggtgagagcctgctgtgtgccaggctttgtgctgagtgctgtacatgtattagttcctttactgctgaccacattgtacccatttcacagagaaggagctgagaaattatgaggcttgcttaagagcatgcaggtaggaagtggcagaacagggacttgaaccaagccctctgctctgaagaccgcgtcctgaatttcttcactagagcttcctcatcaggttacccagaagtgggtcccatccaccatccaggtgtgcttggatgttagttctccaccctcgaggtgtacgctgtgaaaagtttgggagcactgctttataataaaatgaaatatattctaaaaaaaaaaaa

SEQ ID NO: 685 - DNA, 428 bp, Homo sapiens
  CDS (14)..(310)
gaaacttgacgccatgaagatcccggtccttcctgccgtggtgctcctctccctcctggtgctccactctgcccagggagccaccctgggtggtcctgaggaagaaagcaccattgagaattatgcgtcacgacccgaggcctttaacaccccgttcctgaacatcgacaaattgcgatctgcgtttaaggctgatgagttcctgaactggcacgccctctttgagtctatcaaaaggaaacttcctttcctcaactgggatgcctttcctaagctgaaaggactgaggagcgcaactcctgatgcccagtgaccatgacctccactggaagagggggctagcgtgagcgctgattctcaacctaccataactctttcctgcctcaggaactccaataaaacattttccatccaacaaaaaaaaaaaa

SEQ ID NO: 686 - DNA, 386 bp, Homo sapiens
  CDS (14)..(268)
gaaacttgacgccatgaagatcccggtccttcctgccgtggtgctcctctccctcctggtgctccactctgcccagggagccaccctgggtggtcctgaggaagaaagcaccattgagaattatgcgtcacgacccgaggcgtttaaggctgatgagttcctgaactggcacgccctctttgagtctatcaaaaggaaacttcctttcctcaactgggatgcctttcctaagctgaaaggactgaggagcgcaactcctgatgcccagtgaccatgacctccactggaagagggggctagcgtgagcgctgattctcaacctaccataactctttcctgcctcaggaactccaataaaacattttccatccaacaaaaaaaaaaaa

SEQ ID NO: 687 - DNA, 1108 bp, Homo sapiens
  CDS (1)..(1065)
atggggcctggacgatgcctcctgacggccttgttgcttctggccctggcgccaccgccggaagcctcccagtactgcggccgccttgaatactggaacccagacaacaagtgctgcagcagctgcctgcaacgcttcgggccgcccccctgcccggactatgagttccgggaaaactgcggactcaatgaccacggcgatttcgtaacgcccccgttccgaaagtgttcttctgggcagtgcaaccccgacggcgcggagctatgtagcccctgcggcggcggagccgtgacccctactcccgccgcgggcgggggcagaaccccgtggcgctgcagagagaggccggtccctgccaaggggcactgccccctcacacctggaaacccaggcgcccctagctcccaggagcgcagctcaccagcaagttccattgcctggaggacccctgagcctgtccctcagcaggcctggccgaatttccttccgctcgtggtgctggtcctgctcctgaccttggcggtgatagcgatcctcctgtttattctgctctggcatctctgctggcccaaggagaaagccgacccctatccctatcctggcttggtctgcggagtccccaacacccacaccccttcctcctcgcatctgtcctccccaggcgccctggagacaggggacacatggaaggaggcctcactacttccactcctgagcagggaactgtccagtctggcgtcacaacccctgtctcgcctcctggatgagctggaggtgctggaagagctgattgtactgctggaccctgagcctgggccaggtgggggtatggcccatggcactactcgacacctggccgcaagatatgggctgcctgctgcctggtccacctttgcctattcgctgaggccgagtcgctcgccgctgcgggctctgattgagatggtggtggcaagggagccctctgcctccctgggccagcttggcacacacctcgcccagctagggcgggcagatgcattgcgggtgctgtccaagcttggctcatctggggtttgctgggcttaacacccaataaagaactttgctgactactaaaaaaaaaaaa

SEQ ID NO: 688 - DNA, 544 bp, Homo sapiens
  CDS (1)..(501)
atggggcctggacgatgcctcctgacggccttgttgcttctggccctggcgccaccgccggaagcctcccagtactgcggccgccttgaatactggaacccagacaacaagtgctgcagcagctgcctgcaacgcttcgggccgcccccctgcccggaactgtccagtctggcgtcacaacccctgtctcgcctcctggatgagctggaggtgctggaagagctgattgtactgctggaccctgagcctgggccaggtgggggtatggcccatggcactactcgacacctggccgcaagatatgggctgcctgctgcctggtccacctttgcctattcgctgaggccgagtcgctcgccgctgcgggctctgattgagatggtggtggcaagggagccctctgcctccctgggccagcttggcacacacctcgcccagctagggcgggcagatgcattgcgggtgctgtccaagcttggctcatctggggtttgctgggcttaacacccaataaagaactttgctgactactaaaaaaaaaaaa

SEQ ID NO: 689 - DNA, 2297 bp, Homo sapiens
  CDS (58)..(2202)
tttcgtgtccaagatcagcgatatcacgcgtcccccggagcatcgcgtgcaggagccatggcgcgggagctataccacgaagagttcgcccgggcgggcaagcaggcggggctgcaggtctggaggattgagaagctggagctggtgcccgtgccccagagcgctcacggcgacttctacgtcggggatgcctacctggtgctgcacacggccaagacgagccgaggcttcacctaccgcctgcacttctggctcggaaaggagtgttcccaggatgaaagcacagctgctgccatcttcactgttcagatggatgactatttgggtggcaagccagtgcagaatagagaacttcaaggatatgagtctaatgactttgttagctatttcaaaggcggtctgaaatacaaggctggaggcgtggcatctggattaaatcatgttcttacgaacgacctgacagccaagaggctcctacatgtgaagggtcgtagagtggtgagagccacagaagttccccttagctgggatagtttcaacaagggtgactgcttcatcattgaccttggcaccgaaatttatcagtggtgtggttcctcgtgcaacaaatatgaacgtctgaaggcaaaccaggtagctactggcattcggtacaatgaaaggaaaggaaggtctgaactaattgtcgtggaagaaggaagtgaaccctcagaacttataaaggtcttaggggaaaagccagagcttccagatggaggtgatgatgatgacattatagcagacataagtaacaggaaaatggctaaactatacatggtttcagatgcaagtggctccatgagagtgactgtggtggcagaagaaaaccccttctcaatggcaatgctgctgtctgaagaatgctttattttggaccacggggctgccaaacaaattttcgtatggaaaggtaaagatgctaatccccaagagaggaaggctgcaatgaagacagctgaagaatttctacagcaaatgaattattccaagaatacccaaattcaagttcttccagaaggaggtgaaacaccaatcttcaaacagttttttaaggactggagagataaagatcagagtgatggcttcgggaaagtttatgtcacagagaaagtggctcaaataaaacaaattccctttgatgcctcaaaattacacagttctccgcagatggcagcccagcacaatatggtggatgatggttctggcaaagtggagatttggcgtgtagaaaacaatggtaggatccaagttgaccaaaactcatatggtgaattctatggtggtgactgctacatcatactctacacctatcccagaggacagattatctacacgtggcaaggagcaaatgccacacgagatgagctgacaacatctgcgttcctgactgttcagttggatcggtcccttggaggacaggctgtgcagatccgagtctcccaaggcaaagagcctgttcacctactgagtttgttcaaagacaaaccgctcattatttacaagaatggaacatcaaagaaaggaggtcaggcacctgctccccctacacgcctctttcaagtccggagaaacctggcatctatcaccagaattgtggaggttgatgttgatgcaaattcactgaattctaacgatgtttttgtcctgaaactgccacaaaatagtggctacatctgggtaggaaaaggtgctagccaggaggaggagaaaggagcagagtatgtagcaagtgtcctaaagtgcaaaaccttaaggatccaagaaggcgaggagccagaggagttctggaattcccttggagggaaaaaagactaccagacctcaccactactggaaacccaggctgaagaccatccacctcggctttacggctgctctaacaaaactggaagatttgttattgaagagattccaggagagttcacccaggatgatttagctgaagatgatgtcatgttactagatgcttgggaacagatatttatttggattggcaaagatgctaatgaagttgagaaaaaagaatctctgaagtctgccaaaatgtaccttgagacagacccttctggaagagacaagaggacaccaattgtcatcataaaacagggccatgagccacccacattcacaggctggttcctgggctgggattccagcaagtggtaaattggtatttgtaaaaagcaaacaaacattacaaggcagttatctcattgctgttttgggagaggaacgggaaaagctttttgcttatttgt

SEQ ID NO: 690 - DNA, 1089 bp, Homo sapiens
  CDS (298)..(693)
cggcgggcaagccccgcgtgctgtgccatgaggcagaggtcttcctgtccaccgggagcgagctcgtctacgtgtacgaccaggagggcgggctgctgaccgcggcgttccggttccccgaccaggtgtggcacctggagctgctggcgccgcgcaggttgctgtacgcgctgtgcgcccggaggggcctctactgcctgtcgctggaccacccgggcaggagcaggtctacgagccaggatgacagggacagcgaggacggtgaccagccttcccccgtgatccctgtggaccccgatgcctgcatccttcccgatgctgcgctgtgcgcgttcaccttgctggacagtgtgctggtcaccctggtgcagggccctgcccgatggaagatgcagctgtttgagcagccctgtcctggggaggacccccggccaggaggccagatcggtgaggtggagctgtcctcctacacgcccccagccggggtcccaggaaagcctgcagccccccacttccttccagtgctgtgctctgtgtcaccatcaggctccagggtcccgcacgacctcctcgggggctccgggggcttcacgctggaggacgccctcttcgggctcctctttggagctgatgccaccctcctgcagtcacctgtggtcctctgtggtctccctgatggccagctctgctgtgtgatcctgaaggccctggtcacctccaggtcagcccctggtgacccaaatgcccttgtcaagatcctccatcacctggaggagcccgtcatcttcataggggccttgaagacagagccacaggctgcagaagctgcagagaattttctgcctgacgaggatgtgcactgtgactgcctggtggcctttggtcaccacggccggatgctggccatcaaggccagctgggatgagtccgggaagctggtgcccgagctgcgggagtactgcctcccaggccctgtgctctgcgctgcctgtggcgggggtggccgcgtgtaccacagcaccccttctgacctctgtgtggtggatctgtctcggggaagcaccccgctgggccctgagcagcccgaag

SEQ ID NO: 691 - DNA, 2072 bp, Homo sapiens
  CDS (163)..(1743)
gtgtggccatccatctgagtttgatgaaatattgaatgctatatcatatagcaaaggtgcatctgtcatccgaatgctgcatgactacattggggataaggactttaagaaaggaatgaacatgtatttaaccaagttccaacaaaagaatgctgccgcaggatggacgtggtagaggtcgcgggcagttggtgggcacaagagcgagaggacatcattatgaaatacgaaaagggacaccgagctgggctgccagaggacaaggggcctaagccttttcgaagctacaacaacaacgtcgatcatttggggattgtacatgagacggagctgcctcctctgactgcgcgggaggcgaagcaaattcggcgggagatcagccgaaagagcaagtgggtggatatgctgggagactgggagaaatacaaaagcagcagaaagctcatagatcgagcgtacaagggaatgcccatgaacatccggggcccgatgtggtcagtcctcctgaacactgaggaaatgaagttgaaaaaccccggaagataccagatcatgaaggagaagggcaagaggtcatctgagcacatccagcgcatcgaccgggacgtaagcgggacattaaggaagcatatattcttcagggatcgatacggaaccaagcagcgggaactactccacatcctcctggcatatgaggagtataacccggaggtgggctactgcagggacctgagccacatcgccgccttgttcctcctctatcttcctgaggaggatgcattctgggcactggtgcagctgctggccagtgagaggcactccctgcagggatttcacagcccaaatggcgggaccgtccaggggctccaagaccaacaggagcatgtggtagccacgtcacaacccaagaccatggggcatcagatctctctcgggctcaccctgcgcctgtgggacgtgtatctggtagaaggcgaacaggcgttgatgccgataacaagaatcgcctttaaggttcagcagaagcgcctcacgaagacgtccaggtgtggcccgtgggcacgtttttgcaaccggttcgttgatacctgggccagggatgaggacactgtgctcaagcatcttagggcctctatgaagaaactaacaagaaagcagggggacctgcaacccccagccaaacccgagcaagggtcgtcggcatccaggcctgtgccggcttcacgtggcgggaagaccctctgcaagggggacaggcaggcccctccaggcccaccagcccggttcccgcggcccatttggtcagcttccccgccacgggcacctcgttcttccacaccctgtcctggtggggctgtccgggaagacacctaccctgtgggcactcagggtgtgcccagcccggccctggctcagggaggacctcagggttcctggagattcctgcagtggaactccatgccccgcctcccaacggacctggacgtagagggcccttggttccgccattatgatttcagacagagctgctgggtccgtgccatatcccaggaggaccagctggccccctgctggcaggctgaacaccctgcggagcgggtgagatcggctttcgctgcacccagcactgattccgaccagggcacccccttcagagctagggacgaacagccgtgtgctcccacctcagggccttgcctctgcggcctccacttggaaagttctcagttccctccaggcttctagaagcatctgggccagggctcatggctggataatttccctaggcttaacaacccaagcaagcttcgcatcctcgttttatttttggttaaacttatgaaaatgtattaagaaagagtgcagctcgagagagattcagagatggaacacaccagaccccagatcacaaagccaaccatgcccagcccctcccagcacccccagccccacgaccatcgttctgaattctgacgacaccgtgagcctgcctttgtacttcaaactcatggaaggataaccaccttcatgttttgaaataaatgtttcctgttgaaatgaaaaaaaaaaaa

SEQ ID NO: 692 - DNA, 2084 bp, Homo sapiens
  CDS (163)..(1755)
gtgtggccatccatctgagtttgatgaaatattgaatgctatatcatatagcaaaggtgcatctgtcatccgaatgctgcatgactacattggggataaggactttaagaaaggaatgaacatgtatttaaccaagttccaacaaaagaatgctgccgcaggatggacgtggtagaggtcgcgggcagttggtgggcacaagagcgagaggacatcattatgaaatacgaaaagggacaccgagctgggctgccagaggacaaggggcctaagccttttcgaagctacaacaacaacgtcgatcatttggggattgtacatgagacggagctgcctcctctgactgcgcgggaggcgaagcaaattcggcgggagatcagccgaaagagcaagtgggtggatatgctgggagactgggagaaatacaaaagcagcagaaagctcatagatcgagcgtacaagggaatgcccatgaacatccggggcccgatgtggtcagtcctcctgaacactgaggaaatgaagttgaacatccagcgcatcgaccgggacgtaagcgggacattaaggaagcatatattcttcagggatcgatacggaaccaagcagcgggaactactccacatcctcctggcatatgaggagtataacccggaggtgggctactgcagggacctgagccacatcgccgccttgttcctcctctatcttcctgaggaggatgcattctgggcactggtgcagctgctggccagtgagaggcactccctgcagggatttcacagcccaaatggcgggaccgtccaggggctccaagaccaacaggagcatgtggtagccacgtcacaacccaagaccatggggcatcaggacaagaaagatctatgtgggcagtgttccccgttaggctgcctcatccggatattgattgacgggatctctctcgggctcaccctgcgcctgtgggacgtgtatctggtagaaggcgaacaggcgttgatgccgataacaagaatcgcctttaaggttcagcagaagcgcctcacgaagacgtccaggtgtggcccgtgggcacgtttttgcaaccggttcgttgatacctgggccagggatgaggacactgtgctcaagcatcttagggcctctatgaagaaactaacaagaaagcagggggacctgcaacccccagccaaacccgagcaagggtcgtcggcatccaggcctgtgccggcttcacgtggcgggaagaccctctgcaagggggacaggcaggcccctccaggcccaccagcccggttcccgcggcccatttggtcagcttccccgccacgggcacctcgttcttccacaccctgtcctggtggggctgtccgggaagacacctaccctgtgggcactcagggtgtgcccagcccggccctggctcagggaggacctcagggttcctggagattcctgcagtggaactccatgccccgcctcccaacggacctggacgtagagggcccttggttccgccattatgatttcagacagagctgctgggtccgtgccatatcccaggaggaccagctggccccctgctggcaggctgaacaccctgcggagcgggtgagatcggctttcgctgcacccagcactgattccgaccagggcacccccttcagagctagggacgaacagccgtgtgctcccacctcagggccttgcctctgcggcctccacttggaaagttctcagttccctccaggcttctagaagcatctgggccagggctcatggctggataatttccctaggcttaacaacccaagcaagcttcgcatcctcgttttatttttggttaaacttatgaaaatgtattaagaaagagtgcagctcgagagagattcagagatggaacacaccagaccccagatcacaaagccaaccatgcccagcccctcccagcacccccagccccacgaccatcgttctgaattctgacgacaccgtgagcctgcctttgtacttcaaactcatggaaggataaccaccttcatgttttgaaataaatgtttcctgttgaaatgaaaaaaaaaaaa

SEQ ID NO: 693 - DNA, 2294 bp, Homo sapiens
  CDS (259)..(1401)
cagaggctcgggaaggggcgtggatccccggaggcggtccccgggttgcagtgagggaagtgggccgggaggagagatgggcggtgaagaggcccggccctgccagggaggcgggcggatccgtggcagtgaccagaaggggccggaagggggtggccgccggccgggccccgccctggggccgcctccccgcgggttccgttggctgtgggcggcagctgacgcttgtggcggcggtggcttcggggtgggcgtaagatggcgacagcagcgcagggacccctaagcttgctgtggggctggctgtggagcgagcgcttctggctacccgagaacgtgagctgggctgatctggaggggccggccgacggctacggttacccccgcggccggcacatcctctcggtgttcccgctggcggcgggcatcttcttcgtgaggctgctcttcgagcgatttattgccaaaccctgtgcactccgtattggcatcgaggacagtggtccttatcaggcccaacccaatgccatccttgaaaaggtgttcatatctattaccaagtatcctgataagaaaaggctggagggcctgtcaaagcagctggattggaatgtccgaaaaatccaatgctggtttcgccatcggaggaatcaggacaagcccccaacgcttactaaattctgtgaaagcatgtggagattcacattttatttatgtatattctgctatggaattagatttctctggtcgtcaccttggttctgggacatccgacagtgctggcataactatccatttcagcctctttcaagtgggctttatcactattatatcatggaattggccttctattggtcccttatgttttctcagtttacagacattaaaagaaaggacttcctgatcatgtttgtgcatcacttggtcaccattgggcttatctccttctcctacatcaacaatatggttcgagtgggaactctgatcatgtgtctacatgatgtctcagacttcttgctggaggcagccaaactggccaattatgccaagtatcagcggctctgtgacaccctttttgtgatcttcagtgctgtttttatggttacacgactaggaatctatccattctggattctgaacacgaccctctttgagagttgggagataatcgggccttatgcttcatggtggctcctcaatggcctgctgctgaccctacagcttctgcatgtcatctggtcctacctaattgcacggattgctttgaaagccttgatcaggggaaaggtgacctgtccaggaaggattagaccctgtactctccactctttcctcacctccttccttttttctatgcctggcgggagctggacagtttcatctcttgcatgtatcgaaggatgatcgcagtgatgtggagagcagctcagaggaagaagatgtgaccacctgcacaaaaagtccctgtgacagtagctccagcaatggtgccaatcgggtgaatggtcacatgggaggcagctactgggctgaagagtaaggtggttgctatagggacttcagcacacatggacttgtagggccactggcaacatactcctcttggcccttcccatatctactcttctgtgattgggagactgcaaggcactgaggagtatcaaagaagcaaatattttcactttgaaagaaaactgccattttgtatttatagctcccaggttctttcagtaatgttatttgctctgtgtgtttttgtgtgtttgttgatgggcgtttgtgcatatgcgtgagtttcattgccggggttggggcacaattgtggactggggccatgaggccttccctggtccccactgaacccaccttagttccacatttgggtgcatcttgaattatgccgactccagacttctcctccttttttgcccttggctcttgaccctttaaacccctggaccatttgaatggagcagccaagttcagtcccccatttttgtactgttcctctttcccagctggaatatgtcccatgatgaagttgtatagaaacagacccatggatggatggccaggattcccgtggtccctagctagatccccttcctatcaatcccctgatagcaacagggacagctgccaatcccctgctctttactcaatggtacccagggagggagcatgggaaaagggtgagctgagggctggaggagggcaccaccccctgggtgagctgttcccggtcttatactattgtttgtgattaaaagtgcttccccccaaaaaaaaaaaaa

SEQ ID NO: 694 - DNA, 1118 bp, Homo sapiens
  CDS (225)..(905)
tttcgtgcggtcgggtccgggcgcccgcgcagaatcagctgtctgagctgcccaggcggcgggggagcagcgagcgggcttcagcgagccgcaggaggcacaggcctgtcctgggtccccgcaggtctgcgcgtctgttgttcccagcgctctgagaggcctgaaaaggaagagcaacctgtccagaatccccgcaggaaaggaaaaggaggggaaatctcgacatggaaaaactcttcaatgaaaatgaaggaatgccttcgaatcaaggaaagatagacaatgaagaacagccaccgcacgagggaaagccagaagtagcttgtattctggaagacaagaagttagaaaacgagggaaacacagaaaacacgggcaagagagttgaggaaccgttaaaggataaagaaaagccagagagtgcgggaaaggcaaaaggagaaggaaagtcagagaggaagggaaagtcagagatgcagggaggatcaaagacagagggaaagccagagagagggggaagggcagagggtgaaggagagccagacagtgaaagagagccagagagtgagggagagccagaaagtgaaacaagggctgcaggaaagcgcccagctgaggatgatatacccaggaaagccaaaagaaaaaccaacaaggggctggctcagtacctcaagcaatataaggaagccatacatgatatgaatttcagcaatgaggacatgataagagaatttgacaacatggctagggtggaggataaaaggagaaaaagcaaacagaaattgggggcgtttttgtggatgcaaagaaatttacaggaccccttctatcctaggggtccaagggaattcaggggtggctgcagggccccacgaagggacactgaagacattccttatgtgtagtgtccctggcaggcatttgtcaggccatatgttttaaccttatggtaatactttgctttagtcgttcctcctgctaccagtagcgttttgacccacctgccagtgtttgcttgctctatgtttcagtagcagattttcacacatgtgcattgcagagacgtcatgattcgtggaaaaataaagcagcttataatatcaaaaaaaaaaaaa

SEQ ID NO: 695 - DNA, 2001 bp, Homo sapiens
  CDS (303)..(1508)
ctggactcatttacttttacagttatatcatagacttgctttctggcactggtttcctggaggaaactagcctcttttacggacattacaccattgatgaggtgaaatttcagaacttcacctatgatctgcccctggcgtatttgttaagcacaatcgcctccctggccctgagccttctttggatagtgaaaaggtcggtggaaggattcaaaatcaacctgattcggagtgaggagcactttcagagttactgcaacaagatatttgccggctgggacttctgcatcactaaccgcagcatggcggatctgaagcacagcagcttgcggtacgagctccgagcagatctggaggaagaaagaatgcggcagaaaatagcagaaaggacctcagaagaaacaatacgcatttactctttgagactgtttttgaactgtattgttctggctgttttaggggcatgcttttatgcaatatacgtagcaactgtcttctcgcaagagcacatgaaaaaggaaatcgacaagatggtttttggagagaacctcttcatattgtatctaccgtctattgtgatcacgctggccaattttatcaccccaatgatctttgccaagatcatccgctatgaggattattctccaggctttgagatccgtctgacaatccttaggtgtgtctttatgcggctggccaccatatgtgtcctggtgttcacgctgggctccaagatcacatcctgtgatgatgacacatgtgacctttgcggctacaaccagaaactctacccgtgctgggagacccaagttgggcaggaaatgtacaagctgatgatcttcgacttcatcatcatcttggctgtgacactcttcgtggattttcctagaaagctcctggtgacctactgttcctcttgcaagctgattcagtgctgggggcagcaggagtttgccattcctgataacgtcctggggatagtttacgggcaaaccatctgctggatcggagcctttttctcaccccttctccctgcaattgcaaccctgaaattcattatcatcttctatgtgaaagagtggagtctgctttacacctgcagaccctcccccaggccgttcagagcatccaattctaatttcttcttcctgttggtgttgttgatcgggctgtgtttggcaataatacctctgacaatcagcatatcacgcatcccttcctcgaaagcctgtgggccgttcaccaacttcaacaccacctgggaggtcatccccaagacagtgagcaccttccccagctcgctgcagtccttcatccatggtgtcacatccgaagcctttgcagttcctttcttcatgattatttgcctcatcatgttttacttcattgccttagctggagcacacaaacgggtggtcatccagctccgagagcagctatccctggaaagtcgtgacaagtgctacctaatccagaaactaacagaagcccaaagggacatgaggaactaactagactgagcgtgaagatggtgctgcctgttgcttctaagctgacctagtgattctgctgagcctacagagtctacctgggttttgagtggacatttaaaaatatatttttcttgagtttaggcttttccatatgtgcagctgtgtttacctaacccagcccttaattagggcttcagtgacttagaaaagcaggggaaacccaaggctttgcctgcagaccggccactctgtgacaactctaccaaaaaccaacaagccattcaagcttttacaagaatgaaagagcggagacggtagtttagtatttgagccacgagtttatgtgcacaagtgttttgggttgtggactgaagctcagcctgttaatcagaccagcccatgagtgtataacaaacagaattggaggctggtttcttaaacacacacgtccacattttttagggttgttttcctgtgcttacaatttttaatgcatgtgccttttatt

SEQ ID NO: 696 - DNA, 1866 bp, Homo sapiens
  CDS (211)..(441)
ggggtgggtgggtgaggaggagagagccacaaaatgataagagtggagagcagtgtggggccctccctttgagggaaagccgttgtttacatagggtagtaggccttgttggcctgatcaagagatgaagccataactcttaaaaaccttcagaaccaaacgctgtgtctgcatccatctgttctcactggccctctgcatggtaaagttatgtcaccacaaagtgatgccgcattacaatcacttatgaaactgttagcccttaatatgcatcacatttgtggttccatagtgcttctcctttgcttgtttgatctctgcatggcagcagtggggcagctccacatttggagcccatactccaaaatgcagagcactcttctcacagcacacattcccagccccaaacaaaacctgaattttcaactctgcccattaaagtgaatgtatccctgtaatttagtatgtacttattatggaaaatgtaacaaaagcagagaagtgtgatttcattctgtatcacaaattgaagcaaatcaacagcaaatacagcaggattcagggaggcttagtttacaacgtactttgtacctcctgccatttaaattattttgccactctgggcttctgaaaacacaaagggagatacagccctccaactatgagccttgcagagagagacaaaagggccagaggtcctgggatggaatactagagcccccaccttctcatgctttggaaacctgccagagcacttaccctgctggaagattaatgaagactccattctgtgtttcataacagtagcgttgttttctccatcaaaaacagagggtcacagaaatgtgctgaaaagatgtggtccagcaaggttctgtagtcccacctcagtgcctgtgggctgtgtttttcactgtaacaagcactttggtaaactagaaagaagaaaggattctcaggatgtgttcaaagctaagagagttttcattttaaaaagaaacatacatactcactccatggctttcctcatcctcctctcttttttcttcttggtgggaagctggatgcggggcatgcatcattctgtatggacaaatgtgttatgtccacccatactcttgtgacaactccccagcactgtcctgcaataccatgctggccttggtagtaaaactccttggtatctgtgagagtcctctttttctatgccctagactacttttaaccacttttctctggaatgactcccacatttggttgggtattgaaagggtaacagcaaaatgatgattgtggagatggatctattaggtctcatgttggtcccctggttgaaactattttcaaaaaagccccaacaatgggcctgtcaccttgctagtcatccattcttaatgcctatttatcagccctctgaggtcatataaaagttgcaccttttgaaccaagtatttgtatttactatgggaaaggtgtggactacagattcgtattatattattttaatggattttaagtaatttataagtatgctgagtgtaaattttttttaaaaactgtattataaaaggacatatcctgtgaaatataacattttactgtttaatagaataattctataagaagaatgatttatctcacccacggaactgattacattccggatgcaatcaataggcactttgtaatttcctttttgtttttttttctttgctggggggttgaggggtaacaagataccatctgtataaagtgcagtttgtgtcactcaaaatatgcactgtatggctacacaaaagcagcttgatgaacaaatcaccccatggctcattaaagaacaaagcttccagaagcaaaaaaaaaaaa

SEQ ID NO: 697 - DNA, 658 bp, Homo sapiens
  CDS (228)..(455)
tttcgtgggcgggatgtaaccggctgctgagctggcagtcctgtgtcgctaggcttctgcccggccgccgccgcacataagctgcgaggaggagctttacgacttcccggtcttcggggccgggcgcagcaagggccagactctgcgctagcaggcgctgcgcgccaaccggccggcacctgtcgcagaaggtgcaaccgatcgcactgtcgcgcagaagctcctcaatggccagcgccagctgcagccccggccgcccactcgcctcatctgagcctggctggcagcctgctatcaattacattgatagtaaatttgaggactacctaaatgcagaatcgcgagtgaacagatgtcagatgcctggtaacagggtgcagtgttgtttatacttcattgctccttcaggacatgggtggcagacaagaaacatggattattgcgtggagttccattagtaggaataagactcattctacattcttgttgttcttagtgttttttgtttttcatgagaaggaattgtatcagcacaaggcaatattctaacatgacaatgacagcagacagaacctcaataaactctgacttggtactgcaaacaccatttcatgataccttaattcaaataaacctttgtttaatcaaaaaaaaaaaa

SEQ ID NO: 698 - DNA, 1023 bp, Homo sapiens
  CDS (31)..(1020)
ggtttccgggccggcgggtggccgctcaccatgcccggcaagcaccagcatttccaggaacctgaggtcggctgctgcgggaaatacttcctgtttggcttcaacattgtcttctgggtgctgggagccctgttcctggctatcggcctctgggcctggggtgagaagggcgttctctcgaacatctcagcgctgacagatctgggaggccttgaccccgtgtggcttgtttgtggtagttggaggcgtcatgtcggtgctgggctttgctgggctgcaattggggccctccgggagaacaccttcctgctcaagtttttctccgtgttcctcggtctcatcttcttcctggagctggcaacagggatcctggcctttgtcttcaaggactggattcgagaccagctcaacctcttcatcaacaacaacgtcaaggcctaccgggacgacattgacctccagaacctcattgactttgctcaggaatactggtcttgctgcggagcccgaggccccaatgactggaacctcaatatctacttcaactgcactgacttgaaccccagccgggagcgctgcggggtgcccttctcctgctgcgtcagggaccctgcggaggatgtcctcaacacccagtgtggctacgacgtccggctcaaactggagctggagcagcagggcttcatccacaccaaaggctgcgtgggccagtttgagaagtggctgcaggacaacctgattgtggtggcgggagtcttcatgggcatcgccctcctccagatctttggcatctgcctggcccagaacctcgtgagtgacatcaaggcagtgaaagccaactggagcaaatggaatgatgactttgaaaaccactggcttacgcccaccatttccgaggtcctgtccacggcggggcctcagcagaactctctgactggggcccctggcccggccccacccagccgacatgttttctttggcctgggtggtttataccctgagccaacctttaaaaattggtag

SEQ ID NO: 699 - DNA, 1629 bp, Homo sapiens
  CDS (73)..(1563)
aattctctggtcgacgatttcgtcctggggttatgacccaagaggttggcctgctcctgcaagacatgggtgatgatgtataccagcagtaccggtcacttacgcgtcagagcagatgactttgatacgcagtcaggtttttccattaatagtcaggtctttgctgcagatggtgcctccactgagacttccgcatctgggacctcccaaggagaggcttcaactccagaggagtctcgagatgggaagaaagataaagaaggggaccgggcctctgaggaaggcaaacagaaaggcaagggcagcaaacctttaatgcctacctccactatccttcgtcttctggcagagttggtgaggtcctatgttggtattgctaccctgattgccaactacagctacactgtgggccagtctgaactgatcaaagaggactgcagtgtgctagcttttgttctggaccacctgctcccacatacccagaatgcagaagacaaggacacccctgccttggcccgcctgttcctcgcaagcctggctgctgcagggagtggcacagatgcccaggtggccctagtgaatgaagtaaaagcagcccttggacgggcactggctatggctgagagtacagagaaacatgccaggcttcaggcagtgatgtgtatcatcagtactatcatggagtcctgcccctccacctccagcttctacagcagtgccacagcgaagacccagcacaatggcatgaacaacatcattcggcttttcctgaagaagggactggttaatgacctggccagagtacctcacagcttagacctgtccagtcccaacatggccaacacagtcaatgctgctctgaagcctttggaaacactttcccggattgtgaaccagcccagtagcctttttggcagcaagagtgcttctagcaagaacaagtctgagcaggatgcccaaggagcctctcaagattccagtagcaaccagcaggacccaggcgagcctggggaagcagaagtgcaggaggaggatcatgatgtcactcagacagaggtggcagatggggatatcatggatggggaggctgaaaccgactcagtggtgattgctgggcagcctgaggtgctcagttcacaagagatgcaggttgagaatgagctggaggacctgatagatgagttgcttgagagggatggcggatctgggaacagtacaattatagtgagcagaagtggagaggatgaatcacaagaggacgtgctgatggatgaagctccttccaacctcagccaagcttccaccttgcaggccaaccgagaagattccatgaatatcctggaccctgaggatgaggaggagcacactcaggaagaggacagcagtggcagtaacgaggatgaggatgaaatccaccaactcaccgtgtgtgtcccagctgccccatcttccccagcgcatacctgttcctcttctcattctctccccgccgcctgtttcctcaccttctctcccctttccatgccgtccatgatccccaccccatgtgttttaaaaaggcagtagccttagcagggccctgtctgtcccaactgtttgaacagtgagctcctcagaaaaaaaaaaaaa

SEQ ID NO: 700 - DNA, 2318 bp, Homo sapiens
  CDS (644)..(2116)
ggactcgggacatgctgctagatgctggggttcctgccgttccacttggctgcgggtccgcaaggcccggccccagctcatcctcagccgccggccccgccgccggctcgggagcctgcgctggtgcggtcggcggcgcctactggcggcggttactgcaagcccaggcggccggcgtggaactggagggagggagcccgccaggatgtcgcgcgcggcaggcggcccggagacccaacaaccgggacccccagacccgatccctaggcccgaccccggcctccgaaccccgaggtccgaacccgaactcgaatccgcctcgatgttgccaccgggcctcttctcatcccaccggtgcggcccgtgtgcccctggccgcgcgttgctgctgctgccggtcgagcagggttttacttttagtgggatctgtcgtgtgacttgcctctatggccaggtgcaggtatttggttttaccatcagccaaggccagcctgcccaagacatcttctctgtgtatacccactcttgcttgagtatccatgcacttcactactcacagcctgagaaaagcaagaaggaactgaaaagggaagcccggaatttgctcaaatctcatcttaaccttgatgacaggcgttggtcgatgcagaatttttctcctcagtgttccattgtgttgctagaacatctgaaaactgccactgtaaacttcataaccagctatccgggttcatcctacatttttgtgcaagagagtccaactccccagattaaacctgaatatttagccttgaggtctgttggcatcagaagagagaaaaaaaggaaaggccttcagttaactgagagtaccctttcagccctggaagagttagtcaatgtttcctgtgaagaagtagatggctgccctgtcattctagtttgtggatcccaggatgttggaaagtcaacatttaatagatacctgattaaccatttgttaaatagtcttccctgcgttgactatttggaatgtgatctgggacagacagaatttacccctcctggttgcatttctttgcttaatattacagaaccagttctgggaccacctttcactcacctgaggactccacagaagatggtatattatgggaaaccttcttgtaaaaacaactatgagaattatattgacatagtgaaatatgtgttcagcgcttacaagagagagtcccctctcatcgtcaacactatgggatgggtttcagaccaggggctcctgcttctcattgatctgatccgattgctgtctcccagccacgtggttcagttccgctctgaccacagtaaatatatgccagaccttaccccgcagtatgtagatgacatggatggcttgtacacaaaaagcaagaccaagatgagaaatcgacgtttcagactcgcagcatttgcagatgctttggaatttgctgatgaagaaaaagagagtccagttgagttcactggacataaactgataggtgtttatacagactttgcattcagaataactccaagaaatagagagtcacataacaaaattcttcgagatctgtccatcttgagttaccttagccagctgcagcccccgatgcccaaaccactttctcctttacatagcctgacaccctatcaggtccctttcaatgcagtcgcactccggattacccactctgatgtcgcccctacccatatactatatgctgtaaacgccagctgggttggtctttgcaagatccaggatgacgtcagaggatacacgaatgggcccatcctgcttgcccagactccaatctgtgactgcttgggctttggcatctgtagaggcattgacatggagaagcggctgtaccacatcctcacccctgtgcccccggaagagctaaggaccgtgaattgtctgctcgttggagctattgccattccacattgtgtccttaagtgccagcgtgggatcgaagggacagtaccttatgtcacaacggattacaattttaaacttcctggagcatcagagaaaattggagcaagagaacctgaggaggcacataaagagaaaccataccgaagacctaagttctgtcgaaaaatgaagtgatgctcgcgtttttaataagggaagaaactttcctaccagaaagctttgtctcaagcctgaccacaagagacatgatggagtttcatggccatgaatggtgcccttattaacaacagtgttttttgtgtaattcgtgaatgtcatatagtagtcttaagtttctcttttaaagctgcatgagctagaaaaaaaaaaaaaa

SEQ ID NO: 701 - DNA, 1070 bp, Homo sapiens
  CDS (332)..(652)
ccggcgagctgctcggcggctctgcgcgctgtgtaccgcctcaagggtcgcagcgaggccaagcctctggccgtatgcctcggccgcgtggccgacgtctacagatactgccgtgtgagagtacctgaggggctcctgaaagacctactgccaggaccagtgaccctggtgatggaacgctcggaggagctcaacaaggacctaaacccttttacgcctcttgtaggcattcggattcctgatcatgcttttatgcaagacttggctcagatgtttgagggtccgcttgctctcactagtgccaacctcagctcccaggccagttctctgaatgtcgaggagttccaggatctctggcctcagttgtccttggttattgatgggggacaaattggggatggccagagccccgagtgtcgccttggctcaactgtggttgatttgtctgtgcccggaaagtttggcatcattcgtccaggctgtgccctggaaagtactacagccatcctccaacagaagtacggactgctcccctcacatgcgtcctacctgtgaaactctgggaagcaggaaggcccaagacctggtgctggatactatgtgtctgtccactgacgactgtcaaggcctcatttgcagaggccaccggagctagggcactagcctgacttttaaggcagtgtgtctttctgagcactgtagaccaagcccttggagctgctggtttagccttgcacctggggaaaggatgtatttatttgtattttcatatatcagccaaaagctgaatggaaaagttaagaacattcctaggtggccttattctaataagtttcttctgtctgttttgtttttcaattgaaaagtaattaaataacagatttagaatctagtgagagcctcctctctggtgggtgggtggcatttaaggtcaaaacccagccagaagtgctggtgctgttaacaaagtctcaggtggtgcggtgggggtcatgctgtatccaaatttggaggccgcggaaacatgttggccccggtcaatcaccgggacctagatcccctcataatac

SEQ ID NO: 702 - DNA, 971 bp, Homo sapiens
  CDS (332)..(553)
ccggcgagctgctcggcggctctgcgcgctgtgtaccgcctcaagggtcgcagcgaggccaagcctctggccgtatgcctcggccgcgtggccgacgtctacagatactgccgtgtgagagtacctgaggggctcctgaaagacctactgccaggaccagtgaccctggtgatggaacgctcggaggagctcaacaaggacctaaacccttttacgcctcttgtaggcattcggattcctgatcatgcttttatgcaagacttggctcagatgtttgagggtccgcttgctctcactagtgccaacctcagctcccaggccagttctctgaatgtcgaggagttccaggatctctggcctcagttgtccttggttattgatgggggacaaattggggatggccagagccccgagtgtcgccttggctcaactgtggttgatttgtctgtgcccggaaagtttggcatcattcgtccaggctgtgccctggaaagtactacagccatcctccactgacgactgtcaaggcctcatttgcagaggccaccggagctagggcactagcctgacttttaaggcagtgtgtctttctgagcactgtagaccaagcccttggagctgctggtttagccttgcacctggggaaaggatgtatttatttgtattttcatatatcagccaaaagctgaatggaaaagttaagaacattcctaggtggccttattctaataagtttcttctgtctgttttgtttttcaattgaaaagtaattaaataacagatttagaatctagtgagagcctcctctctggtgggtgggtggcatttaaggtcaaaacccagccagaagtgctggtgctgttaacaaagtctcaggtggtgcggtgggggtcatgctgtatccaaatttggaggccgcggaaacatgttggccccggtcaatcaccgggacctagatcccctcataatac

SEQ ID NO: 703 - DNA, 1623 bp, Homo sapiens
  CDS (129)..(1496)
aaagctatgaggatactctgttcgtaagctcccggtgaattttgttccacagactcggaagaaaggttggataagagttcactggagattgacaagtactcgggatagtgaaaagccggagttggaacatggatagccgcttgcaggagatccgggagcggcagaagttacggcgacagctcctcgcgcagcagttgggagctgaaagtgccgacagcattggtgccgtgttaaatagcaaagatgagcagagagaaattgctgaaacaagagaaacttgcagggcttcctatgatacctctgctccaaatgcaaaacgtaagtatctggatgaaggagagacagatgaagacaaaatggaagaatataaggatgaactagaaatgcaacaggatgaagaaaatttgccatatgaagaagagatttacaaagattctagtacttttcttaagggaacacagagcttaaatccccataatgattactgccaacattttgtagacactggacatagacctcagaatttcatcagggatgtaggtttagctgacagatttgaagaatatcctaaactgagggagctcatcaggctaaaggatgagttaatagctaaatctaacactcctcccatgtacttacaagccgatatagaagcctttgacatcagagaactaacacccaaatttgatgtgattcttctggaaccccctttagaagaatattacagagaaactggcatcactgctaatgaaaaatgctggacttgggatgatattatgaagttagaaattgatgagattgcagcacctcgatcatttatttttctctggtgtggttctggggaggggttggaccttggaagagtgtgtttacgaaaatggggttacagaagatgtgaagatatttgttggattaaaaccaataaaaacaatcctgggaagactaagactttagatccaaaggctgtctttcagagaacaaaggaacactgcctcatggggatcaaaggaactgtgaagcgtagcacagacggggacttcattcatgctaatgttgacattgacttaattatcacagaagaacctgaaattggcaatatagaaaaacctgtagaaatttttcatataattgagcatttttgtcttggtagaagacgccttcatctatttggaagagatagtacaattcgaccaggctggctcacagttggaccaacgcttacaaatagcaactacaatgcagaaacatatgcatcctatttcagtgctcctaattcctacttgactggttgtacagaagaaattgagagacttcgaccaaaatcgcctcctcccaaatctaaatctgaccgaggaggtggagctcccagaggtggaggaagaggtggaacttctgctggccgtggacgagaaagaaatagatctaacttccgaggagaaagaggtggctttagagggggccgtggaggagcacacagaggtggctttccacctcgataattgttgaagacattgaacctattcatcctcctctaaccttctttattggaattaaatttcaagtgggagacttaactttagaactcacttccagcttgcactttgctttaatttctctgagctg

SEQ ID NO: 704 - DNA, 1928 bp, Homo sapiens
  CDS (89)..(1015)
tgtattggaccgagttccagatgggccagtatttattgctatgtgttttctagtgagagtaatggatgcagttagctttgctgcagcaatgactgcatcttcttctatcctggcaaaggcttttccaaataacgtggctacggtattgggaagtcttgagactttttctggactggggctaatactaggtcctcctgtaggtggctttttgtatcaatcctttggctatgaagtgccttttattgttctgggatgcgtcgttttgctgatggtaccactcaatatgtatattttacccaattacgagtctgatccaggtgaacactcattctggaaactgatcgctttacccaaagttggccttatagccttcgtcatcaactcactcagctcgtgttttggcttcctcgatcctactctgtctctctttgttttggagaagttcaatttaccagctggatatgtgggactagtattcctgggtatggcactgtcctatgccatctcttcaccactatttggtctcctaagtgataaaaggccacctctaaggaaatggcttctggtgtttggcaacttaatcacagccgggtgctacatgctcttagggcctgtcccaatcttgcatattaaaagtcagctctggctgctggtgctgatattagttgtaagtggcctctctgctggaatgagtataattccaactttcccggaaattctcagttgtgcacatgaaaatgggtttgaagagggattaagtacattgggacttgtatcaggtctttttagtgcaatgtggtcaattggtgcttttatgggaccaacgctgggtggatttctgtatgagaaaattggttttgaatgggcagcagctatacaaggtctatgggctctgataagtggattagccatgggcttgttttatctactggagtattcaaggagaaaaaggtctaaatctcaaaacatcctcagcacagaggaggaacgaactactctcttgcctaatgaaacctagtccgatggatcctggattgatacaaggttgagaaatgaatgctcctggccttaaacatcaccgtaggaagggtttttaaaattttacgcgcaaaactccgtggaccccgtgccagtgtcttggaagtgtcaacgtgtttttggatgatcctgtattgggctgtacttactgtgatactgaaaagctgtcctgctgaagcagctatatttgaaatattaagtatgaaaggagtaattaaaaacaagcaaaacaaaacaagacttagtttttaaatgaccaaacttgtccttaaagatgttgttattaactcgagttagttcttatttcctctgtttattttttattctaagtacactgattctgtgaatgtaccttttttattaacagggaaagaaatgaattaatttgatatgctctaaatacataaaggtgcttcaaaatatgtagaaacattactatgaaatcagtttttaaaagatatactttctctttgtcctgaggtttttcggtcttgttcaaaaggaagaattcttgcctgccatacagaaactctctagcactccctgaccttaagcttttctaaaaattctgtttgtgtgaaaagtacaagaataacaatacttacaacttccatttttgtaacctacgttcacttatgatctggatttataaacattacttggtataacgtttttcatttcctttaatgtctctgttttttggctctaccatctgttttgtttttgtttttatctatattcttggtagatgtatttcatccctagagcaggtcagcctccttcccctaatgcgaatgcttgttttgttagggaagggcttcctccaacttcgtgtgaaattgtgatgttgaagtgaataaatgtctattgtgtaaaaaaaaaaaaaaaaa

SEQ ID NO: 705 - DNA, 419 bp, Homo sapiens
  CDS (26)..(238)
ccacgcgtccgctgtccacttcgccatggagaagatcctgatcctcctgcttgtcgccctctctgtggcctatgcagctcctggcccccgggggatcattatcaacctgacgctctatgggatttactacaagtgtccctgtgagcgtggcctgacctgtgagggagacaagaccatcgtgggctccatcaccaacaccaactttggcatctgccatgacgctggacgctccaagcagtgagactgcccacccactcccacacctagcccagaatgctgtaggccactaggcgcaggggcatctctcccctgctccagcgcatctcccgggctggccacctccttgaccagcatatctgttttctgattgcgctcttcacaattaaaggcctcctgcaaaccttaaaaaaaaaaaaaaa

SEQ ID NO: 706 - DNA, 4112 bp, Homo sapiens
  CDS (391)..(1173)
accggaattcccggggcgacgatttcgtgcttcctgtcccacatctttctcacggtggcgcctggacacagcagccaccacagtccaggggtgcagggccagggtgtgaccctgcccgggcagccacccctccctgagaagaagcgggcctcggagggggatcgttctttgggctcagtctctccctcctccagtggcttctccagcccgcacagcgggagcaccatcagtatccccttcccaaatgtccttcccgacttttccaaggcttcagaagcggcctcacctctgccagatagtccaggtgataaacttgtgatcgtgaaatttgttcaagacacttccaagttctggtacaaggcggatatttcaagagaacaagccatcgccatgttgaaggacaaggagccgggctcattcattgttcgagacagccattccttccgaggggcctatggcctggccatgaaggtggccacgcccccaccttcagtcctgcagctgaacaagaaagctggagatttggccaatgaactcgtccggcactttttgatcgagtgtaccccgaagggagtgcggttgaaagggtgctcgaatgaaccatatttcgggagcctgacggccttggtgtgccagcattccatcacgcccttggccttgccgtgcaagctgcttatcccagagagagatccattggaggaaatagcagaaagttctccccagacggcagccaattcagcagctgagctgttgaagcagggggcagcctgcaacgtgtggtacttgaactctgtggagatggagtccctcaccggccaccaggcgatccagaaggccctgagcatcaccctggtccaggagcctccacctgtgtccacagttgtgcacttcaaggtgtcagcccagggcatcaccctgacagacaatcagaggaagctcttcttccggaggcattaccccgtgaacagtgtgattttctgtgccttggacccacaagacaggaagtggatcaaagatggcccttcctcaaaagtctttggatttgtggcccggaagcagggcagtgccacggataatgtgtgccacctgtttgcagagcatgaccctgagcagcctgccagtgccattgtcaacttcgtatcaaaggtcatgattggttccccaaagaaggtctgagaactcccctccctccctggacccaccgatgcctctcgaagccctggagacagccgttgggtgagggtggggcccccactttttaccaaactagtaaacctgacattccaggcccatgaggggaaagaggatcttccagctctgcaaaaacaagaacaaacaacatcaccgtgaattggcctttcctgaaagtgacttatctgacacatctctgtagccacatgctttttgggtagaagaagctgggcatgggtgcaccccaccccctagggtccccatgggaaagggacatgcaaggaaacagcacagaacacgaggtggtccccatgtccctggcacactagcattccgggggatgaggaatccccagcccttgaggcagaggtgccgagtgactgccatgcttcgcccgtccgcatgggcgcttctgtccagctgcacccgaggccgggggtttccctcacctcggtcttcccaagatggagatgctaacgaaactgagaagggggcgtatgtttgacgaaggtttgtgcaagtcaggcccttctggaacacagcagggcctacaacgaggggcctttgcgatgggctgtgaggatgggggtggtgggaagaattggccacgttagagaccccatgccaccccaccatggtgagtgctctgtgcctcctgctcacctgtggtgagctgggcgagctgggcgagctgggcgagctgggctggggagagcctgtgaggaccgagaggagaaatgagaagaaggaacaaaaatattatttctatgtaatttatattttacttatgccaaattatttatgataatttgccattgctatactgtaccagtgtcaaatgctgcagcctgccaagctgtgattttgtgaggcttgtccctatgtaggatgcaccgcaggcccctggccactgaaagagtgtgcagtggactgtgggtctcccatatgcggtgccgcccaaaggtggctttgcctcaagcaacctaccctgatgttttactcattggaatgtttttccccgattgtggatgacttcttttctgatggagagagtccaggagggatggaaaactcctggatttaagctcagcatcccccacatgggcttttcgatcatcttcaggcctgaagctgcacgacctgaagttcgcctgcatttatcagccctctttgtgctgctccttgccaccttggggttcctgctggggaccatgtgtggttgtggcatgtgtgagcagaagggaggatgaggaaaaagagaagaaaccccggtactgacaagctgtttttgagtgccactgtttgccatcatctaagccactgaatcaagtgtatttcaggcttatttcaacattccaatgccctggttttcctgcttgaatctgttcgtggtcaaaggtttgggggaatttgtgaccctggaacatccccagagtgaaagatggagctgggccacatcagaataaggccttggccccatcctctcacagcctaggtgctctgcaggcatgctgactgtcctgattgcgatccagcccgaaattccctcctctgctttcaaaagtcaaatcccccattcttaggccacactggtgtcacaagctcctgtcagggagctggggtttgggaatgtgctttgtgaactctgctttaaagtgaggggccgaggaaaacttagaaacaggcagagttggaagcagccaaatcacagtgggtgttgtgtgtgtgtgcgtgtgtgcatgcgtgcgtgtatgcgtgtgtgaaagcaggtggaccattccactttttagctcctattgatgcaccaaaccaagtgcctcatttctgtgccaaatgtttgccttggtcgttgtggacctccttctctaacttgcggtggcatgactgtcaggaggtgctggcattttcagcagatcctcatgtgttgaccctgatgtctttagcagaggcctctagcatctcggtttttcatccactgcaggaatgtggccacagggagcagaggtttgtactttccccaagaggtcctcatcctgagacggtctctacccatgtttaacccaaagagtgcaggccaggttccttatccttctgatgaaggatgagagagctcatttagaagtcagagcaaactagggtctcagtattgagaaacgcagcctgccagggaatcacagagacatcggggtgcccgcgatggccctcatgaagccatgcctcgacggcattcaggaagccctgcaaacgtgctttttgaactcattggccaggtgtgatttttacacaaggtaaacgtggtcaagggcatcggggaatttgctccaagcagatagctccctctgaggaaccaaaggaagcaagtttccacgatttctgaagagctggtataggaagtttctttcttccttttgtgttacatgtgcattaaacagaacaagctgtgtgtcatcacagattgtactgtgggctcagaaaccgtgagagagcccccaccgtggacaccggctctagggccacaggaaaaggaacgtttccaggcattttgtctccagggctcccgctggacaggcacgtactgccctggggagtaaatgcggagagttcacgaactgtgcccaacgcatgttatagccagggtcctactaactactcagtaaaagaacgtattgttgtattcctccagtgttaagctatagccatgttaaaagtcactgtgcatttattctcagcatcaaataccttgtaacgtcttctctgccttgttagtgcatatttttacttttctgatactgtaaagaatatatccagtatgtaaatgaatgttctataaatcttttgtatagtcattttctctgctccttaaatatcatctctattcagagtataataaaattatgaacttggtaaaaaaaaaaaaaaaa

SEQ ID NO: 707 - DNA, 1699 bp, Homo sapiens
  CDS (215)..(484)
cacgcgtccgcccacgcgtccgcccacgcgtccgatctcatcatattttttctagcctttcctacatttaaacttgctgttgcccaaattataattttttaaatgtctttggtgggcttctgttaattcacatgacttgagcttatagctatgtctactgcacagattgggtaatggaacactaaacttttatacttgaaaatgacagccttaaatgctcatatcagtcacaaatctaggatgtactgtcttgttgtatgtgagctttgtagagatttttaaaaatataagcatcaccttcccattgaagagtggagagagtctactggatgactggccaggaactttctctctgaatcggacatttggatgtcttctttcttccaagaaatggtggttcacattaaagtatcatggccttatgtatgctcaaatggaatcttatgtaactttcttatttaattttggtctgcttatttttagataaaattgaaaggaattgtataaatcaattaacatattagctgagttgtccaacacatggtataaacgaattacaacagtaaactattacacatttccaacttgcctttggggatttatgaggattttttttggtggggggagggggctccaattcatatctctgaaacccttcacacttggtttactaattcaaagttagaagtctagaatttgccctgccctaacagaaacagattaggaatttgtctacacaaactggtgtcacctgtttcttgactgggatttggtttcctcattataaatatgggaggtagaacagagatctccaacgtctctcccatttatcacagtaattttcttattcacagtaatcattgttggatgttaccttttcagcttcacattctcaagatggtaaaaatcatgtatatagattatcagaactctaagcaaagatgactgtcacatctgaagctgaggtgccttaggtactctactgaccttgatgggtttggagttccccattgcttatcaagagctttttaattgctttggttctttagtttttctttttgcaaaaatccttcctgtcactttaactaaaaaccaaagatttgttttctattgataagcagactagagaaaaactgccttattttcagaagcatgtcttcattcaaagcttaggcttcaatagaaattcagactaatcactgaaatgactatttcaaactagtgaaatatctgggaaataaactgcttcaaaaatattttactgacatgaattttgctagtgaatacaaatacactgcctcaaataaggccatgtatgaatgaacttacaagatatttgagttaatcagtgtttgcatatagagaattagttctaaagttcttaaaaataaatttaggggctccctgaaattttatttaatactttgctaacttacactcttgttttatctccacaggtacattttaggttagctcatggtgaattctatttacaataagtggagcttggattaatgggttttgttatgaattatcttagtgactttagacactgtttccatttgatttttaactatttaaaataccaaattaaataccagtttgttggttgttacttttaaatgattgttactttaacagtgtcccttcttaacacatggggttacaaataaaatactatgcatagcaaaaaaaaaaa

SEQ ID NO: 708 - DNA, 1373 bp, Homo sapiens
  CDS (36)..(1370)
ctggggaagacatcaagtcgtcccccaagcagtacatgcagtgcttcactgtaaagccagtgatgagcttgccgcccagctacaaggataaacctgttccagagcagatcttaaactactacagagccaatgaagtgcagcagttcagatactcccggccgttccggaaaggagaaaaggatccagacaatgaatttgctacgatgtggattgaacggaccacgtatacgactgcatatacctttcctgggattctcaagtggtttgaagtcaaacagatttcaacagaagagatcagtcctctggagaatgccatcgaaaccatggagctgaccaacgagaggatcagcaactgtgttcagcagcatgcctgggaccggtccctctctgtgcaccctctctccatgctgctcagtggcatcgtggacccggccgtcatggggggcttctccaactatgaaaaggctttttttacagaaaagtacttgcaggagcatcctgaagaccaggagaaggttgagctgctaaagcgactaatagcattacagatgcccctgctaacagaagggatccgcatccatggggagaaactcacagagcagctgaagccgctgcatgagcggttgtcttcttgcttccgggaactcaaggagaaagtagaaaagcactatggggttataacactgccacccaacttgacggagaggaagcaaagccgcacggggtctattgtgctcccctacatcatgtcttccactctgcggaggttgtccatcacctcagtcacttcctctgtggtttccacctcttcaaactcgtctgacaatgctccttccagaccgggatctgatggctcaatcttggagccacttttggagcgcagggcctcgtcaggtgccagagttgaagatctgtcccttagagaggagaacagcgagaaccggatcagcaagtttaagagaaaagactggagtctgagcaagtcccaggtcattgcagagaaagcaccagaacccgatttgatgagcccaaccagaaaagcacaaaggccaaagagtctccagttgatggataatcggctatcaccatttcacggttcttcacctcctcagtcaacacccttgagcccacctccactcactcccaaagccaccaggaccctaagctccccatcgttgcagacagatggaatcgcggccactcctgtcccacctccacctccccccaaaagcaagccctatgaaggcagccagaggaactccactgagctcgctcccccactgcctgtccgaagagaagccaaagcaccaccccctccacctccaaaggctcggaagtctggcatccctacttccgagcctggatcccagtaa

SEQ ID NO: 709 - DNA, 1189 bp, Homo sapiens
  CDS (136)..(654)
tttcgtggcagcagtagcgggagcagcagcgtggacgcggctggcgctggcgccatgaacccgctgtaaggcgcaggctgtgcagcacggggtgcgggggaggaggaggaggacgccgcggtgaagttctccgccatgaacctgaggggcctcttccaggacttcaacccgagtaaattcctcatctatgcctgtctgctgctgttctctgtgctgctggcccttcgtttggatggcatcatacagtggagttactgggctgtctttgctccaatatggctgtggaagttaatggtcattgttggagcctcagttggaactggagtctgggcacgaaatcctcaatatcgagcagaaggagaaacgtgtgtggagtttaaagccatgttgattgcagtgggcatccacttgctcttgttgatgtttgaagttctggtctgtgacagaatcgagagaggaagccatttctggctcctggtcttcatgccgctgttctttgtttccccggtgtctgttgcagcttgcgtttggggctttcgacatgacaggtcactagagttagaaatcctgtgttctgtcaacattctccagtttatattcattgccttaagactggacaagatcatccactggccctggcttgtatgtaacttttaaaatccttaaataaagttcttttttattataaaagtaattcatattcactgtacaaagcttggaaaagacggacaagcagaagtaatagcctaatagtcacccataatcccaccatggggagataacatggttagtgtttttatgtctgtgttttatacaaacagtttggatataactgtgtgcaccattttgtatcctgatttttttgttttaatgttgtatcataaacattttatcatgttaataaaaggtctttataaacatgacttctaaagtttaattgatacaaaatattcttcaagtgcatgtatcagaccatcctcttatttctaaaatatggtatttccattgttgccagtgttgaatgattttaaatcatactgcagtatatatgtttatgcattaaaatttttgccttttgttttttggttgttttcttaggaaatagtccagaaatagtgttactgagctagaggttgggaactatttgagattcctatatacgtatactgcactgccaacttgcttttcc

SEQ ID NO: 710 - DNA, 604 bp, Homo sapiens
  CDS (38)..(484)
cgggccggaactcccgggtcgacgatttcgtggattaatgaggctaggcctcaagccccctcgattcccgaagttgttttcctccatgggcgccttgtgccgtcaccgtcggcgacggctttggcatgccgttttcaccgaggaaaaggactcgtatcgtatgctcgctatccagaacctacactctgtcgacccctttgctgatgccagtgaggttgacgacctgcttcatgctggcactgaagatcatatccatataagacctcaacagagaaacggaaggaagacccttactactgtgcaagggatcgctgatgattacgatcaacagaaactagtgaaggcgtttaagataaagtttgcctgcaatggtactgaaattgagcatccggaatatggagaagtaattcagctacagggtgacctacgcaagtacatatgccagttcttcgtagagactggactggctaaggacgatcagctgtaggagcatgggtcggaagagcacatggtacactggcgttgatagtgaggcagtcgttgcaatggatagtatctccattcttttccagaccaccagtctttttactggcgcatgcttcaa

SEQ ID NO: 711 - DNA, 1569 bp, Homo sapiens
  CDS (716)..(1372)
ctgggagttctagctagggtttgcagctgcagctagagttaggggttggttttgaagctggagctaaagctaaatcggggtcggagctgtggaatgggttggcgcccaggctctggggcagatagacgacattcctcctgctgcccaggtctgcgaattgtgttccgagccctaactgcagcggacagaagcccctcccttcacaggaatgcctcagcccagcagaaggagcagtgccacgtcagccaatcggctcaggccctgccctggaaacgacacctgttcatcctcctcccggcaggctcacctgagtgcaggttaggcaggtgaagtgtctccccggaaaccaagctagagtgccccacctgctcggccctgccttctcggatcggatccagcacatccaggcttctcctcctcccgaggaaccagtggtgacagctgaggccatgtgagtaggatcctgaatgaggctttatctctggctgttcgtcccatcgtccaccgtggcaccagctccctcagccagccgggatgggaccagcgactgagagagccagaggcagagaggtgagggtgaccatatcctggactgtgagaggaatgggactctgggcctgtagctgccaagcaggtggcaggtgctccaggctgtgatctgcaccctctgacccctgacattgacctcctaccctgacccctgcctgaccaagccatgtctgaacaggaggctcaagccccagggggccgggggctgcccccggacatgctggcagagcaggtggagctgtggtggtcccagcagccgcggcgctcggcgctctgcttcgtcgtggccgtgggcctcgtggcaggctgtggcgcgggcggcgtggcactgctgtcaaccaccagcagccgctcaggtgaatggcggctagcaacgggcactgtgctctgtttgctggctctgctggttctggtgaaacagctgatgagctcggctgtgcaggacatgaactgcatccgccaggcccaccatgtggccctgctgcgcagtggtggaggggccgacgccctcgtggtgctgctcagtggcctcgtgctgctggtcaccggcctgaccctggccgggctggccgccgcccctgcccctgctcggccgctggccgccatgctgtctgtgggcattgctctggctgccttgggctcgcttttgctgctgggcctgctgctgtatcaagtgggtgtgagcggacactgcccctccatctgtatggccactccctccacccacagtggccatggcggccatggcagcatcttcagcatctcaggacagttgtctgctggccggcgtcacgagaccacatccagcattgccagcctcatctgacggagccagagccgtccttcttctcacagcggcctcagcgtccccagagccgagccagggtgtgagtgcatgtgaacgttgagtacacatgagtgcgtgtatgcccccaggctgggtcagctcttctgtggattgcatggcgtgtgattaaaagcccatgtgttcccacccatccccatcaaaaaaaaaaaaaa

SEQ ID NO: 712 - DNA, 1673 bp, Homo sapiens
  CDS (346)..(1146)
gttagtccgtaccagggacgcctggtaccatcaagaatgacctaaagttgatagaaggcgtggatatcaaggagaaccttcaagaccagatccggcattggttcatcgaatgcagaaatttaaccgggacatttcctgactaccctgacgttgaagaaggagggtcagctattattttttctgacaaggaccatacaacaggttattgaggatatcatagcaaaccaagaggaagaagaaaaaaacaaaaagaagaagaagaaaaaggaaaaacaacccaagaaagccaaaaaacaaaagaaaggaacaaaggagaaaaataaggaagaagacgaaaaatggaaaatgtcaccaagtctttttcttcctgcaatgaaggaaggatgtaacgcatacaaagaaatctggatgaaaaaagatgagtcttggaatttctctcaggactatgatccagaactgatcaaagaggagaaacgaaaagaattacagtcagagatcaggatacaggttgatgagttgatgagacaggaacttaaaaacttaaagctagctgtggacagagaaagggagcgcccagtgaaagcaggaaagaaaaaggacaagaagataggaaagaaaggcaaaaagaaagagaagaaggcaaagaaggataaagatctgacagctgacaggaccatcgagtctctgtataaggaactggtggaagaaggattactgatccaggctctgaaagtcaacctctctgattacattggtgagtacagctacctggggactactcttcgccaggtgtccatagaacccatgccctccctcctggatgtcagacagctcatcacattgtacggaatctggccattaggttctgcagcagtgcatgagaaagctcctttggtgaaatcgctactgttagccgggccgtctggggtagggaagaaaatgctggtccatgccatctgcaccgaaacgggagccaacctcttcaacttgtcctcctctaacattgctgggaaataccctggcaaaaatggcctccaaatgatgctgcatgcagtcttcaaggtggctcgacagctccagccctccgtggtgtggattgaagacacagaaaaaaccttctacaaaaagttcccaacgcagaaaagatgaatgaacctaaacgcctgaaaaaacaccttccccaaatcctgaaactcctgaaaccagatgaccggattctgattgtggggaccacacggcgtcccttcgatgctgaactccaatctttctgcaaagtttaccagaaaattattttggtgcccagaccagactatgcttccagatacgttctgtggaagcaaatcattgaacgcaatggaggagtcctcaccagtgccttgaatgtcagctgcctggcgaaggtcactgacggcttcacccaaggacatatagtcgaagtggttaaaggcgtgctcacagatcagagaatccggcggcaaattcataaacctctcactgcagttgagtttattacggcgataaccagcatgaatccagtgtacaaagaggaagaagagagctttaagaactggtatgccaaaactcctctgggtaaaaaacgtgccttggcgataacaggaggcagcacagaaaaggcaaaggacaaagggaaaaggaaataaaaaaaaaaaaaa

SEQ ID NO: 713 - DNA, 2425 bp, Homo sapiens
  CDS (174)..(1421)
gtcgtgatcagacgagcggtgagcgatcgatactcctatgctagcctctggctcctcaggggacacagccgagtggtcggaccaaacgcaacgagtcttcgccagcccaaaggcgactcgacaccgtcccagctgaagagaggcatgggactgaaccagctggtggtggcccgatggctggagacacccactgccccgcagagcccctggccagagaaggcactttatgggaggccctcagggcgctcctgccgcacagtaaagaagacctgaagttggacctcggggagaaagtggagaggagcgtggtgacattgttgcagcgagccactgagctcttctacgagggcaggagggacgagtgtctgcagagcagcgaggtgatcctgggctactcctgggagaagctcaacacgggcacatggcaggacgtagacaaagactggcgccgggtctacgccatcggctgcctcctgaaagccctgtgtctgtgccaggcacctgaggatgccaacactgtggccgcagccctgcgggtctgtgacatgggcctgctgatgggggcagccatcctgggggacatccttcttaaagtcgctgccatcctccagacacacctccctggaaagaggcctgcccgtggctccctcccagagcaaccctgcacaaagaaagcaagggcggaccatggtttgattccagatgtgaagttagaaaaaacagtcccccggctgcaccgtccgtccctccagcatttcagggagcagtttttggttccagggaggcccgtgatcctgaaaggcgtggctgaccactggccgtgcatgcagaagtggagtttggagtatatccaggagatcgctggctgccgaactgtcccagtggaagttggttcgaggtacacagatgaggaatggtcccagaccctcatgacggtcaacgagttcatcagcaaatacatcgtgaatgagccaagggacgtcgggtaccttgctcagcaccagctctttgaccagatcccggagttgaagcaggacatcagcatccccgactactgcagcctgggcgatggggaggaggaggaaatcaccatcaatgcctggtttggtccccagggaaccatctccccactacatcaggatccccagcaaaacttcctagtgcaggtgatggggaggaagtacatccggctgtattccccgcaggagtcaggggctctgtaccctcatgacacgcaccttctccataacacgagccaggttgacgtggagaatcccgacctggaaaagttccccaagtttgccaaggccccattcctgtcctgcatcctgtctcctggagagatcctgttcatcccggtgaaatactggcattacgtgcgggctctggatttgagcttctcggtcagcttctggtggtcgtagccaggataggagctgaaagggcctgacatgcagacagcattcatctgttcactaatttcctgggtcctggaatctatagagacaagcaggactgaacctgtgtcctgaagagccttcactgcccagtggcagccctggggggctgagctccagcactggacaggcacagagcaggggctgcccaggaaggagcacactccaggccaggggtgcatggcagaggaaggtggggagagcccagaaggacattgcagacagacagcctgcatggggactctggcatcagaaagccgaatgtttttgggaaacgggtgggtcacacaggcaggggtgaaacatgggctctgaggttggctacctgattcaaacccggccgcgctgcgcacctgctgggtgacttggccaggatcccccacttcgctgtgcccatatggaaaagagggcaaggccagtcctcactgccgagggccgagaaggcggtgccgagcccctgctgctgcatgaaccttagccgctgtcactgatcccaattactctgatccttttgcccttccttcccataacggcctgctggacgccacagcctgaatactggagagagctgggcattgcccaggtcacaggagagagtccgtagagacctgcgcaggagccgggacccctgctgagcagtgggagctttctgtcatccccatggctcaaggataacctacctgcctgcagagaagtgcgaaggtcttgctggatgacttttcacccgcactcacccaggagcaggctcccaagtgaagaaaccaccaaaccatcaccagctcctagaagcctccctcccaccaccttctagtcaccatcccccagaagtaatgactctcaaacctgggggatttgaggccagggggagagccaggctctatgctttctgtaattgtgtctcgtttgtgtgcacgcaggtttgttttatgttttggccattaagattttccccagccaaaaaaaaaaaa

SEQ ID NO: 714 - DNA, 4899 bp, Homo sapiens
  CDS (3405)..(3695)
tttcgtgtgcccgggtgggtggctgcgcagggccctacctgggcgggagcggctgcagagccctgtccacgcggtgcctccccagcacggcacctcccactccaggctgttggttacctggccgggagctggcggagaccaggatttctcctcgccgccgttgctgttgttaggggaaacagaccatctgcatctagacctgcctctctctccgctccccacttcagacgagctcttcctgcctggaatctgtgatccgtatgtgaaactttcattgtacgtagcggatgagaatagagaacttgctttggtccagacaaaaacaattaaaaagacactgaacccaaaatggaatgaagaattttatttcagggtaaacccatctaatcacagactcctatttgaagtatttgacgaaaatagactgacacgagacgacttcctgggccaggtggacgtgccccttagtcaccttccgacagaagatccaaccatggagcgaccctatacatttaaggactttctcctcagaccaagaagtcataagtctcgagttaagggatttttgcgattgaaaatggcctatatgccaaaaaatggaggtcaagatgaagaaaacagtgaccagagggatgacatggagcatggatgggaagttgttgactcaaatgactcggcttctcagcaccaagaggaacttcctcctcctcctctgcctcccgggtgggaagaaaaagtggacaatttaggccgaacttactatgtcaaccacaacaaccggaccactcagtggcacagaccaagcctgatggacgtgtcctcggagtcggacaataacatcagacagatcaaccaggaggcagcacaccggcgcttccgctcccgcaggcacatcagcgaagacttggagcccgagccctcggagggcggggatgtccccgagccttgggagaccatttcagaggaagtgaatatcgctggagactctctcggtctggctctgcccccaccaccggcctccccaggatctcggaccagccctcaggagctgtcagaggaactaagcagaaggcttcagatcactccagactccaatggggaacagttcagctctttgattcaaagagaaccctcctcaaggttgaggtcatgcagtgtcaccgacgcagttgcagaacagggccatctaccaccgccatcagtggcctatgtacataccacgccgggtctgccttcaggctgggaagaaagaaaagatgctaaggggcgcacatactatgtcaatcataacaatcgaaccacaacttggactcgacctatcatgcagcttgcagaagatggtgcgtccggatcagccacaaacagtaacaaccatctaatcgagcctcagatccgccggcctcgtagcctcagctcgccaacagtaactttatctgccccgctggagggtgccaaggactcacccgtacgtcgggctgtgaaagacaccctttccaacccacagtccccacagccatcaccttacaactcccccaaaccacaacacaaagtcacacagagcttcttgccacccggctgggaaatgaggatagcgccaaacggccggcccttcttcattgatcataacacaaagactacaacctgggaagatccacgtttgaaatttccagtacatatgcggtcaaagacatctttaaaccccaatgaccttggcccccttcctcctggctgggaagaaagaattcacttggatggccgaacgttttatattgatcataatagcaaaattactcagtgggaagacccaagactgcagaacccagctattactggtccggctgtcccttactccagagaatttaagcagaaatatgactacttcaggaagaaattaaagaaacctgctgatatccccaataggtttgaaatgaaacttcacagaaataacatatttgaagagtcctatcggagaattatgtccgtgaaaagaccagatgtcctaaaagctagactgtggattgagtttgaatcagagaaaggtcttgactatgggggtgtggccagagaatggttcttcttactgtccaaagagatgttcaacccctactacggcctctttgagtactctgccacggacaactacacccttcagatcaaccctaattcaggcctctgtaatgaggatcatttgtcctacttcacttttattggaagagttgctggtctggccgtatttcatgggaagctcttagatggtttcttcattagaccattttacaagatgatgttgggaaagcagataaccctgaatgacatggaatctgtggatagtgaatattacaactctttgaaatggatcctggagaatgaccctactgagctggacctcatgttctgcatagacgaagaaaactttggacagacatatcaagtggatttgaagcccaatgggtcagaaataatggtcacaaatgaaaacaaaagggaatatatcgacttagtcatccagtggagatttgtgaacagggtccagaagcagatgaacgccttcttggagggattcacagaactacttcctattgatttgattaaaatttttgacgaaaatgagctggagttgctcatgtgcggcctcggtgatgtggatgtgaatgactggagacagcattctatttacaagaacggctactgcccaaaccaccccgtcattcagtggttctggaaggctgtgctactcatggacgccgaaaagcgtatccggttactgcagtttgtcacagggacatcgcgagtacctatgaatggatttgccgaactttatggttccaatggtcctcagctgtttacaatagagcaatggggcagtcctgagaaactgcccagagctcacacatgctttaatcgccttgacttacctccatatgaaacctttgaagatttacgagagaaacttctcatggccgtggaaaatgctcaaggatttgaaggggtggattaagcaccctgtgcctcgggggtggttgttcttcaagcaagttctgcttgcacttttgcatttgcctaacagacttttgcagaggcgatggcagagagcagctgcaggcatggtccctggagccgagccttcaccacgcactcgtccaagttcggatgcgggaacctggtcccagcttgagttcctgcctttcccaccacaaattatcaactggttgatgtgtacactaattacatttcaggaggacttaatgctatttatgttgtgcctctgcaggcaaagcccttaataaatattttacatcctttctaatgacaatgaatggaattaatcactcaacaggtatagtattacgactcatgtttactttttaaaatgatttagaccgattttcagattttatttcgttatgattaaagatgtctcatgtacttggaaaagtgagcatttttttttttttttgtatttcactttcataccaggcttaatgtcaatgacatttttatttttgaagtactctgacacctccaccctctactttattagaattggaaggcaaatttttgtccaaaaacctacagacaagtactttgagagaatttccaatataatattagacataatgataattttttccatactcagaatgaaaaactggatattacgtttttgttttggggtttttttgtacaaatttagctaatagctacaggctgagagaattgtaacatagcatgacaaattttgtgttgacttgaaaggaatcacaccattattccttagaagtaattacatgtgttctaacacatttgagacagggttggactcccatttctcatccgagaaattacttaacccttcctggcgctgtacagtcatcttttattctatttcctctttgctgtttgtagtagagacattttgaatgaaacttggcactgcttgattcaaaactgtggaaaccagatctgtttagtctcctgtttgtatgcgtttgctaatggtagctaaataaccagtttttgttgtaaatgcaccaattctgaaggcactttatgtactacatggaggtcatatctggttttgtttttatttttttatcatgaacattaaatgtgatgatgatttcttttccctgcacacatctttccggtgcaatatctatcaattgtgaatctggctgctggtgtataaaaacctggatgtaaagctgagcctacagacctgtcctcaccaactgttttgtgatttctactcaactacaaagatttatttaatgtactcttaatctaactgagttttgttaccaatgacctgttgcatgcttcaataccgtgtactgcctgagttgtgcctcttgtgtgctagattaaaagtgagacagagacttgacttgatcctctgagctcaagctattgagctggtagtggcagaggactgagggtacctgcacagtttgattcttttccacgtgtaagtctccattgcagaattgtcgtgctttgagaaaacacctgaggcagtgtgggagttgaacgaccctgctgtcctttttaacctgtgttgtcctagaccctgtcggggcagtcaggggacactagagatttgatctcatgcgagtcatcaataggacaaaaaagttgtggtttggggaggtctgtttgttacataaaaaggacctttcggtgtaagaaattgccgtttttaccctgccctggctggcatgtgagaagccatggaaggttgtggttgtaaatgagttgtctaaaggggtgcagaggcctgaggtttctaaaagaaggtagatttctacagagctgagtgttggttcctttttcttattggttgaaaattacctggtagtgatcagaaaacttagatgctatgtaactaaaaaaaaaaaa

SEQ ID NO: 715 - DNA, 1813 bp, Homo sapiens
  CDS (249)..(1559)
ggaggcaggaggagcaagaagtggaaacaagagcagtgccgtcccctcctcctccccccatcgtgaagaagccattgaagcaaggtggggccaaagctccaaaagaggctgaggctgagccagccaaggagacagcggccaagggccatggccaagggccagcccaaggcagggggactgtggtgcgcagctcagactccaagcccaagcggccacaacccagcagggaaattggcaacatcatccgcatgtaccagagccgcccgggccccgtgcctgtgcccgtgcagccatccaggcctcccaaagctttcctgaggaaaatcgaccccaaggacgaggctctggccaagctgggtatcaacggtgcccactcgtccccgccgatgctgtcccccagcccaggaaagggccccccgccagctgtggctcctcgacccaaggccccgctacagcttgggccctctagctccatcaaggaaaagcaggggccccttctggacctgtttggccagaagctgcctattgcccacacacccccacctccaccagcgccaccactgcctctgcccgaggacccagggaccctttcagcagagcgtcgttgcttgacacagcccgtggaggaccagggggtctccacccagctactcgcgccctctggcagcgtgtgcttctcctacaccggcacgccctggaagttgttcctacgcaaggaggtgttctacccacgggagaacttcagccatccctactacctgaggctcctctgtgagcagatcctacgggacaccttctccgagtcctgtatccggatttcccagaatgagcggcggaaaatgaaagacctgctgggaggcttggaggtggacctggattctctcaccaccaccgaagacagcgtcaagaagcgcatcgtggtggccgctcgggacaactgggccaattacttctcccgcttctttcctgtctcgggcgagagtggcagcgacgtgcagctgttagccgtgtcccaccgtgggctgcgactgctcaaggtgacccaaggccccggcctccgccccgaccagctgaagattctctgctcatacagctttgcggaggtgctgggtgtggagtgccggggcggctccaccctggagctgtcactgaagagcgagcagctggtgctgcacacagcccgggcaagggccatcgaggcgctggttgagctattcctgaatgagcttaagaaggactccggctatgtcatcgccctgcgcagctacatcactgacaactgcagcctcctcagcttccaccgtggggacctcatcaagctgctgccggtggccaccctggagccaggctggcagtttggctctgccgggggccgttccggactctttcctgccgacatagtgcagccggctgccgctcccgacttttccttctccaaggagcagaggagtggctggcacaagggtcagctgtccaacggggaaccagggctggctcggtgggacagggcctcagaggtgaggaagatgggagagggacaagcagaggcaaggcctgcctgagactgaggaaggaaaggggtttgaccactcccgaggctgccatgcggtgggaccaccctgctgtccgtctcctgtggctgcccctctgcccgctcctgatggctcgccttgtctctccagcaagaatgtgcactccttgcaggcaggggctgggctggatgctgctcttgtgtcccacgtggtacttagttcaaggctgccccagcagatgcttaataaacagctcttcactttcctggaaaaaaaaaaaa

SEQ ID NO: 716 - DNA, 2554 bp, Homo sapiens
  CDS (324)..(2276)
catcacccccaccccagccccccaccacccccggcctaagcagctaccatggcccaggtggccggcgcggcgttgtcccaggcgggttggtatctttcagatgaaggcattgaagcttgcacaagctctccagacaaagtcaatgtaaatgacatcatcctgattgctctcaatatctgagaacaattggcaagaaattcctccccagtgacatcaatagtggaaaggtagaaaagctcgaaggtccatgtgttttgcaaattcaaaaaattcgcaatgttgctgcaccaaaggataatgaagaatctcaggctgcaccaaggatgctgcgattacagatgactgatggtcatataagttgcacagcagtagaatttagttatatgtcaaaaataagcctgaacacaccacctggaactaaagttaagctctcaggcattgttgacataaaaaatggattcctgctcttgaatgactctaacaccacagttcttggtggtgaagtggaacaccttattgagaaatgggagttacagagaagcttatcaaaacacaatagaagcaatattggaactgaaggtggaccaccgccttttgtgccttttggacagaagtgtgtatctcatgtccaagtggatagcagagaacttgatcgaagaaaaacattgcaagttacaatgcctgtcaaacctacaaatgataatgatgaatttgaaaagcaaaggacggctgctattgctgaagttgcaaagagcaaggaaaccaagacatttggaggaggtggtggtggtgctagaagtaatctcaatatgaatgctgctggtaaccgaaatagggaagttttacagaaagaaaagtcaaccaaatcagagggaaaacatgaaggtgtctatagagaactggttgatgagaaagctctgaagcacataacggaaatgggcttcagtaaggaagcatcgaggcaagctcttatggataatggcaacaacttagaagcagcactgaacgtacttcttacaagcaataaacagaaacctgttatgggtcctcctctgagaggtagaggaaaaggcagggggcgaataagatctgaagatgaagaggacctgggaaatgcaaggccatcagcaccaagcacattatttgatttcttggaatctaaaatgggaactttgaatgtggaagaacctaaatcacagccacagcagcttcatcagggacaatacagatcatcaaatactgagcaaaatggagtaaaagataataatcatctgagacatcctcctcgaaatgataccaggcagccaagaaatgaaaaaccgcctcgttttcaaagagactcccaaaattcaaagtcagttttagaaggcagtggattacctagaaatagaggttctgaaagaccaagtacttcttcagtatctgaagtatgggctgaagacagaatcaaatgtgatagaccgtattctagatatgacagaactaaagatacttcatatcctttaggttctcagcatagtgatggtgcttttaaaaaaagagataactctatgcaaagcagatcaggaaaaggtccctcctttgcagaggcaaaagaaaatccacttcctcaaggatctgtagattataataatcaaaaacgtggaaaaagagaaagccaaacatctattcctgattatttttatgacaggaaatcacaaacaataaataatgaagctttcagtggtataaaaattgaaaaacattttaatgtaaatactgattatcagaatccagttcgaagtaatagtttcattggtgttccaaatggagaagtagaaatgccactgaaaggaagacgaataggacctattaagccagcaggacctgtcacagctgtaccctgtgatgataaaatattttacaatagtgggcccaaacgaagatctgggccaattaagccagaaaaaatactagaatcatctattcctatggagtatgcaaaaatgtggaaacctggagatgaatgttttgcactttattgggaagacaacaagttttaccgggcagaagttgaagccctccattcttcgggtatgacagcagttgttaaattcattgactacggaaactatgaagaggtgctactgagcaatatcaagcccattcaaacagaggcatgggaggaagaaggcacctacgatcaaactctggagttccgtaggggaggtgatggccagccaagacgatccactcggccaacccaacagttttaccaaccaccccgggctcggaactaataggaaaagactctttgtgaagaaacgagccagtgactgaaacaccctggtggaaacctgttgacagaccttccactttctcttcagaataagtagctgtggtggatattattatttgaagaaagaaaaaacagattttagggtggaaaaaacagtcaactcacacaaagaatggaaaaaaatactgagttaaattaagcaaataccttttacaagtgaaaggaagaatttttcttctgccgtcaataaaaccattgtgctataaaaaaaaaaaa

SEQ ID NO: 717 - DNA, 480 bp, Homo sapiens
  CDS (86)..(346)
tacgaggccggtagtgagaacccttccggtgggctaggtactgagcgcgcgaggctctacagagtgaaggtttaaatccaaggtcatggcaaaacatctgaagttcatcgccaggactgtgatggtacaggaagggaacgtggaaagcgcatacaggaccctaaacagaatcctcactatggatgggctcattgaggacattaagcatcggcggtattatgagaagccatgccgccggcgacagagggaaagctatgaaaggtgccggcggatctacaacatggaaatggctcgcaagatcaacttcttgatgcgaaagaatcgggcagatccgtggcagggctgctgaggcctgtgggtgggacacccagtgcgaaaccctcatccagttttctctccatctcttttctttgtacaatcccatttcctattaccattctctgcaataaactcaaatcacatgtctgcaaaaaaaaaaaa

SEQ ID NO: 718 - DNA, 2384 bp, Homo sapiens
  CDS (285)..(1133)
aagccgattggcatgaagtgtactaaagggactaaggttgcggccgcgggtgagtctcgtccgctcgcgctgcccaccgcgtctccatcagctccaggcgcggttccccggcccgcgccgctcccggccccccggctcgggcgcctcccgccgcagcgcaggctcccccgccggccgggctcctgcgcggcgcggctcggctcatgcccccgggcgcggggcacacaggccggccggcagccgctgggaaataggcccccgggggcggtggcggcggcggggccatggcgcggagaccccgggcgccggccgcctccggggaggagttctccttcgtcagcccgctggtgaaatacctgctcttcttcttcaacatgctcttctgggtgatttccatggtgatggtggctgtgggtgtctacgctcggctaatgaagcatgcagaagcagccctagcctgcctggcagtggaccctgccatcctgctgatcgtggtgggtgtcctcatgttcctgctcaccttctgtggctgcattgggtccctccgcgagaacatctgcctcctgcagacgttctccctctgcctcaccgctgtgttcctgctgcagctggccgctgggatcctgggcttcgtcttctcagacaaggctcgagggaaagtgagtgagatcatcaacaatgccattgtgcactaccgagatgacttggatctgcagaacctcattgattttggccagaaaaagtttagctgctgtggagggatttcctacaaggactggtctcagaacatgtatttcaactgctcagaagacaaccccagtcgagagcgctgctctgtgccttactcctgttgcttgcctactcctgaccaggcagtgatcaacactatgtgtggccaaggtatgcaggcctttgactacttggaagctagcaaagtcatctacaccaatggctgtattgacaagttggtcaactggatacacagcaacctattcttacttggtggtgtggctctaggcctggccatcccccagctggtgggaattctgctgtcccagatcctagtgaatcagatcaaagatcagatcaagctacagctctacaaccagcagcaccgggctgacccatggtactgagaatccatcctgcacctcctcaccatggaaactggcaagcctcataaacgaacagcagtgggtgctgaaagcagcaccaaatggagatttggattccagccccccagtgacagcccagtgggaagaagcaaactccagatgggcagaaggcagggtgcacaggtggctccagtctcaggaggatgcgcctcctctcccccatcccagccctcagcattgtgccagagtgatacccttaagtgtttgggtttatgttttcagttttgtttgggaaacagcagttgcacagagagttgggggtactgctgctgccttttcaccgaggcactgccaccaccagctctaccagggatgctcctgagcttggcggacatacttagatcctaacgtgccagtgagacctggctgtggagagtagcactggcagccctgcctggactccacttggcatgataccagctccagaagggaagggagtggagcaggcagtgaggagagagcctgggggtcggctggggacagccgtatgtgctaggtaggagtggagggagatatgtttaccaaatgcctgtcctgccatcctcccaggtagtcagagtgagctacatcctgccccgccttcatttccatggaaacatggcagctaggacacggggtacaacagcagccaaattcttccccacctcccttacttcgaaaaaaagtttggaaccctggtccctatactctgcagtcagaagtgggactgagccatacatgcccttgaattcctccctgtctggccctccctctccagcaagcagggttttctttaacttggcagtgtgcagaggagaagtggtaacacccccaccccattcccctgcatcggagctcagtattcctacagggtaagaggtaggaatcttgctgggacgaggggagccagaagtggcaataaaagcgtgttgacctgggctacgcgggactccatgaattttccattctggcaactggaaggggaggtgtagaagggccctgcagaggacggcactggagactctcctaaacgccacacacctcccccttgctgcccgccacacgcgcgtctccttcaaccgatgcattgccaccctcccacagcctcgccctctgctctaaattaggtcgaaagagtcccagttccaatctaggaacagcataattttgttccaaaacctgatctgtgtttttctaattaaaattaatttgtcacccaaaaaaaaaaaa

SEQ ID NO: 719 - DNA, 1837 bp, Homo sapiens
  CDS (1155)..(1403)
actctccatgctgagggtctgggagcacaggatctcgcagtgcctctgcagggcatccagctggaacaggctggcagctgacagcagctggtagggaggcagagcaggtcttggggacccatggccagaccagtggcccagacagcaccgaacagaaagctcccgagtgccgtgtgccctgctgcctccaccctcaggccccactaccttctgatactcctgggcctaaccatccccgctgggacacgcactgaggctgggctcagtggtgtgcacagttcctctttctgggaactgctcttcctgtcagatggagaggaagagccaccttccctctgaagggggtgaatgggagaccgagccgctgggcaccctggcccaggccccctccccctctcccgagtctcacctccaggatgtcagtggtggggatctccatggattctgttcctccgtagtacagatactgcatcatcatctgtggtgggaagaggcccatgtgaatgccacgtgaacctgaggcatgaaagtccttgccagccccacagggtactgctccagctgccgcctccaggggcctgtccctctgcaggtccccagctctgtctctccctccctctcctgctcaggctgagacttgtgttttcccggggaagccaactccaagaccctctctcctgagtccctgcccggataacaggctctctccttggaatgttttccctacaatcctcatgagaacacgctatgtgaccttgagcaagttactcaacctctccatgcctctgactcctctaccaagaggggataataacatacctacctccctggaactgtgctggaggcctcaatggaaaccaagcaaagcacttagaaccctgcctgcctaagtgttagtaatggctgcccagaccacctgtccagcggttagagctcaggacccatgtgacaggctctgaagctgcagccccacaacggatggctacctctgcacagggaaagacctggatgctctattcattcaacagaatacagaaggcactgggaatagagtgaacaatgacaaccaatgcacagctgcccacaaggtgggctcctgggggagggtcatccctctgagaagagggcggcaccaagacccacacacctgaaaaatgtggtacttcatgtcgctgatctcgatggtcttgctgctgtccccatcctgttctgatttattggtcattagtgtcttgaacctggagcaaaggagacaaagcaaggtgggttttgaaccttttacttcaccactgtgtggcgatggcaccatctgtcacctgaccggctaccacaagacggaacattttaaaaattactgctgtgctcctaaaataattttcagcaagtgccattttacaccatcttaggaagacatctgagctgagcccaattctgtccccaccacccaccctacaagcgacctgacgcctgtggccagaatgctgactcttcattccaggatatttatgttttctaataataaaagcaataactaggccagaaagaacaccacctcagagcccccctttcctgctgccctgggtccaccccgtctcatcccgctgtggggcgagtggggctctgctgcaatgtgactgcagtctgaggggcagaggctgcagggtacagccccagcgagtcactctctgtcacctggaatctgaaacaaggtgcttctgtgcccctgggctgggagtttgttatctgaggctgcctacctgttagaagctgtcaccagcaggactttatgtgcataaaacagctttccttccaccaggaaggtcacaaaaaaaaaaaa

SEQ ID NO: 720 - DNA, 1431 bp, Homo sapiens
  CDS (43)..(1341)
tttcgtagaggcggcaaattgcaaggagacgccgccgccttcatgctgccggcgggctgctcgcgccggctggtggccgagctgcagggcgccctggacgcctgcgcacagcgacaattgcaattggagcagagcctgcgcgtttgccgtcggctgctgcatgcctgggaaccaactgggacccgggctttgaagccacctccagggccagaaactaatggagaggacccccttccagcatgcacacccagtccacaagacctcaaagagttggagtttctgacccaggcactggagaaggctgtacgagttcgaagaggcatcactaaggccggagagagagacaaggcccccagcctgaaatctaggtccattgtcacctcttctggcacgacagcctccgccccaccgcattccccaggccaagctggtggccatgcttcagacacgagacccaccaagggcctccgccagaccacggtgcctgccaagggccaccctgagcgccggctgctgtcagtgggggatgggacccgtgttgggatgggagcccgaacccccaggcctggggcgggcctcagggaccagcaaatggccccatccgctgctcctcaggccccagaagccttcacactcaaggagaaggggcacctgctgcggctgcctgcggcattcaggaaagcagcttcccagaactcgagcctgtgggcccagctcagttccacacagaccagtgattccacggatgccgccgctgccaaaacccagttcctccagaacatgcagacagcttcaggcgggccccagcccaggctcagtgctgtggaggtggaggcggaggcggggcgcctgcggaaggcctgctcgctgctgagactgcgcatgagggaggagctctcggcagcccccatggactggatgcaggagtaccgctgcctgctcacgctggaggggctgcaggccatggtgggccagtgtctgcacaggctgcaggagctgcgtgcagcggtggcggaacagccaccaagaccatgtcctgtggggaggccccccggagcctcgccgtcctgtgggggtagagcggagcctgcatggagcccccagctgcttgtctactccagcacccaggagctgcagaccctggcggccctcaagctgcgagtggctgtgctggaccagcagatccacttggaaaaggtcctgatggctgaactcctccccctggtaagcgctgcacagccgcaggggccgccctggctggccctgtgccgggctgtgcacagcctgctctgcgagggaggagcacgtgtccttaccatcctgcgggatgaacctgcagtctgagcctttcccatgctgccctcggcctgttcaaatggggattgggggtgtcttccctggcactgtgctcggggacccagagatgcctgt

SEQ ID NO: 721 - DNA, 3529 bp, Homo sapiens
  CDS (1145)..(2755)
ggcacgagggacgatggtggtggaaagacgcttctgtgggttaggtcctaacggttaggaaggattcacaggcgggtcatgaggaaggagcagacccctcgggcagaagcccgcgaggagcactgggtgtggtgggggcaggggtgcctcctctgtcaagtggagatcggcgcctcgctcgtgcctgcgagtgcgcgccgcgtcgaatacagccgtacagaacgcactacaggaaagtgaagccgggagagagactgggaggcggcgcggggactgggggccgtagacgcctttgctcccgggcacttgttagaagagcgagtggatcgcgcttcctgtgcgtcactgaatcctcatgacggccactgaaacggacacgcaggatctttgcttttcaagagggaactgagtccaggccagactgggttgctcccctttctctcggcccctccacctttgcaagtgctgctccttctgcctggagtggctcctccagtcttttcccggctcacttcccaccgtccggtgtcagcaaaaacagcacttcctcacagcccgttgcagcccagcagtcgccttttgcttcttttgaagcacagccctgtgaccgcctcgtgtccttttgtttttccttgtcccccttcccctctggaacataagctccacaaaggcagggacctgggaatcccgttcgcctgcattccccagcaaacgcctaacgaacccaatggcccaggactgaaaattcctttccacttcggctttcccctctacatcccatcggttctgtggagctcgaggggcgtcactgtgtgtgtggcagggcacggtgggggctgagatcgtttcctgttggaacttctggcccaagaagcgcgggtcacaaggagaggggtcagttcggttcagagcgactcagcccctcgactcgggtcttaaaacctccgagccgccagttctgcctcaggccgcgccccccttaaagcgccaccagacgctgcgccccgttaaagcgccaccagacgccgcgccccgtcccggcctcccccgcgcgctggcgcggggctttctgggccaggcggggccggcgaactgcggcccggaacggctgaggaagggcccgtcccgccttccccggcgcgccatggagccccgggcggttgcagaagccgtggagacgggtgaggaggatgtgattatggaagctctgcggtcatacaaccaggagcactcccagagcttcacgtttgatgatgcccaacaggaggaccggaagagactggcggagctgctggtctccgtcctggaacagggcttgccaccctcccaccgtgtcatctggctgcagagtgtccgaatcctgtcccgggaccgcaactgcctggacccgttcaccagccgccagagcctgcaggcactagcctgctatgctgacatctctgtctctgaggggtccgtcccagagtccgcagacatggatgttgtactggagtccctcaagtgcctgtgcaacctcgtgctcagcagccctgtggcacagatgctggcagcagaggcccgcctagtggtgaagctcacagagcgtgtggggctgtaccgtgagaggagcttcccccacgatgtccagttctttgacttgcggctcctcttcctgctaacggcactccgcaccgatgtgcgccagcagctgtttcaggagctgaaaggagtgcgcctgctaactgacacactggagctgacgctgggggtgactcctgaagggaaccccccacccacgctccttccttcccaagagactgagcgggccatggagatcctcaaagtgctcttcaacatcaccctggactccatcaagggggaggtggacgaggaagacgctgccctttaccgacacctggggacccttctccggcactgtgtgatgatcgctactgctggagaccgcacagaggagttccacggccacgcagtgaacctcctggggaacttgcccctcaagtgtctggatgttctcctcaccctggagccacatggagactccacggagttcatgggagtgaatatggatgtgattcgtgccctcctcatcttcctagagaagcgtttgcacaagacacacaggctgaaggagagtgtagctcccgtgctgagcgtgctgactgaatgtgcccggatgcaccgcccagccaggaagttcctgaaggcccagggatggccacctccccaggtgctgccccctctgcgggatgtgaggacacggcctgaggttggggagatgctgcggaacaagcttgtccgcctcatgacacacctggacacagatgtgaagagggtggctgccgagttcttgtttgtcctgtgctctgagagtgtgccccgattcatcaagtacacaggctatgggaatgctgctggccttctggctgccaggggcctcatggcaggaggccggcccgagggccagtactcagaggatgaggacacagacacagatgagtacaaggaagccaaagccagcataaaccctgtgaccgggagggtggaggagaagccgcctaaccctatggagggcatgacagaggagcagaaggagcacgaggccatgaagctggtgaccatgtttgacaagctctccaggaacagagtcatccagccaatggggatgagtccccggggtcatcttacgtccctgcaggatgccatgtgcgagactatggagcagcagctctcctcggaccctgactcggaccctgactgaggatggcagctcttctgctcccccatcaggactggtgctgcttccagagacttccttggggttgcaacctggggaagccacatcccactggatccacacccgcccccacttctccatcttagaaaccccttctcttgactcccgttctgttcatgatttgcctctggtccagtttctcatctctggactgcaacggtcttcttgtgctagaactcaggctcagcctcgaattccacagacgaagtactttcttttgtctgcgccaagaggaatgtgttcagaagctgctgcctgagggcagggcctacctgggcacacagaagagcatatgggagggcaggggtttgggtgtgggtgcacacaaagcaagcaccatctgggattggcacactggcagagccagtgtgttggggtatgtgctgcacttcccagggagaaaacctgtcagaactttccatacgagtatatcagaacacacccttccaaggtatgtatgctctgttgttcctgtcctgtcttcactgagcgcagggctggaggcctcttagacattctccttggtcctcgttcagctgcccactgtagtatccacagtgcccgagttctcgctggttttggcaattaaacctccttcctactggtttagactacacttacaacaaggaaaatgcccctcgtgtgaccatagattgagatttataccacataccacacatagccacagaaacatcatcttgaaataaagaagagttttggacaaaaaaaaaaaaa

SEQ ID NO: 722 - DNA, 2472 bp, Homo sapiens
  CDS (136)..(2469)
ggaggagcgccgggcaggtgacgggcggtggcctcccggatctggggtaacgcttttgtgaaccacaactttaaatatcagccagctgctcctatcaacacgagtatcccctgttaattttttgcatttttcaagatgagtaaacgtaaactaattcccaagctctctattcaatctcctgtccttcataccaacttaaatgtccagtccacacacccacctttgaagaaagaagacttacatcggatttcaaaagactccttggaatctgattcagaaagcctcacgcaagagattatgtgccattctgagtttgatgatcgaatccggggcaacggtatggagcccgacagcttagacgaggaggaaagccctcgatggggaagcctacacgagatggaagaggaagcaagtggaaaagcagctcagatggctcgcgagcaaaaccaccatacctgggaccagggcgccaataacaggcaacaaccaatagaagacaaatattcagacctccgctatgacccgaactggaagagtaagaaggaggaagggcagctgctgtctgtggaagcgttgccggagtccacggacagctctttagaaaatctgcctttggctcccctctacccttcccaggagacgtcaatggaactctccgggggaaaaggcgagcagaaagagagtccacagagtgcagcttctttacttggtagtgaatttttaagcccaaactatgagcatggtgcccgtcgcagcaagccgttttcagagctgagcgacagtgacctggaggagaagtcgagcagcctttctccgtacgtgaagagctcaagttcacataacgaggttttcctgccgggatcacgtggccctcggcgaaggaaatccaaacaacattttgtggaaaaaaacaagctcactttgggattacccaccccgaaaacggactcttatcttcaacttcacaataaaaaaagaggggaatctcatccagaacagatctcctaccccgtcagagctacagacaagacgtctattcagaatgccaaggaaatggaaaatgctgccatcgatcctgaagataaatggcatcaaagagcacaacagctaaagaattaccaggaacactggtctcaatatgaaagtacaaaatcaagcaatgtaccaagagggcaaccttctgacatggtgaatgaccatcaaccttccagaagaccagccaagctcaagattcgaaagcagtgtaaacaccagaatggcctgaagtcttccacaacggaagaggtgactgccagtcaggggaaccagaataaccctcccaggcagcaacaaaaccaaaataagcctcttgatacttcaacaaagcctgaatcgattgtgattatgcatgcctctaacaatgatgtacaagcctcaagggcacttagaagccacaatctcaaagaaacctccaatacatttgctccaccaaaacaggcttttgacaaggtcttatctaaaaactctactggatgtgactctgggctgaatgttaataaagaaagaggacacaaagaccaagaagagaaaagattttcatatcagcagctacacaccctttctgacatggatttgaacaaccttaatgaactttctaagagacacgtgctcctgagccagaaaggctctcagtttgtttatcacataaatactcatggatcaaccaaaaataagaaacaactcaaacagccttatacagagacaaaatacaggaacttagaaatgttatggaaattccattcttcttctgacagccagacggttagagcttctccagattcatggctcacccagataatggagcagcatcagcaagccttggtgcagctgaccgacgtgcagcccagtgaaggggccttatccagcgtcacgcttccacctatactgtcaagggtagaaagtgaatcccaactcagttcagagagaagccaaagaaaccaagtgaaaattagccgtagcaattctgaaggctatctgtttcaactggaaaagggaaaaaagcataagaaaagaagcagcagtaagaacaccaagctgaaaggttatcagaaaagagacgtgaagcttggaggcctcggacctgactttgagtccatcagagacaaaacgcaaaaattaatacagcaaaaggaatatgcaaaacaagtcaaggagtacaacatgaagacactatccattctatcaaaaccacaaacagaaaaaactcaaaagaaatctgctatccctcggcagaaggctttggaatacgctaagaccatccccaaacccaaaccatcaaatctgactcatcaagcatcaaaggaacaaaaaaatccaacctatgctgggaaagaagaaagtttacctgaaatctcactgctggaaatactgcagaacagacacgaaagggaaaaacaggctgtggctgctttcaaagtccttcacatcgtatag

SEQ ID NO: 723 - DNA, 2988 bp, Homo sapiens
  CDS (1)..(2484)
atgcgcttggagggagagggccgctcagcgagggcgggacagaatctctcccgggctgggagtgcacggcgcggtgcgcccagggacctcagcatgaacaacctcacagagcttcagcctggcctcttccaccacctgcgcttcttggaggagctgcgtctctctgggaaccatctctcacacatcccaggacaagcattctctggtctctacagcctgaaaatcctgatgctgcagaacaatcagctgggaggaatccccgcagaggcgctgtgggagctgccgagcctgcagtcgctagacctgaattataacaagctgcaggagttccctgtggccatccggaccctgggcagactgcaggaactggggttccataacaacaacatcaaggccatcccagaaaaggccttcatggggaaccctctgctacagacgatacacttttatgataacccaatccagtttgtgggaagatcggcattccagtacctgcctaaactccacacactatctctgaatggtgccatggacatccaggagtttccagatctcaaaggcaccaccagcctggagatcctgaccctgacccgcgcaggcatccggcggctcccatcggggatgtgccaacagctgcccaggctccgagtcctggaactgtctcacaatcaaattgaggagctgcccagcctgcacaggtgtcagaaattggaggaaatcggcctccaacacaaccgcatctgggaaattggagctgacaccttcagccagctgagctccctgcaagccctggatcttagctggaacgccatccggtccatccaccctgaggccttctccaccctgcactccctggtcaagctggacctgacagacaaccagctgaccacactgcccctggctggacttgggggcttgatgcatctgaagctcaaagggaaccttgctctctcccaggccttctccaaggacagtttcccaaaactgaggatcctggaggtgccttatgcctaccagtgctgtccctatgggatgtgtgccagcttcttcaaggcctctgggcagtgggaggctgaagaccttcaccttgatgatgaggagtcttcaaaaaggcccctgggcctccttgccagacaagcagagaaccactatgaccaggacctggatgagctccagctggagatggaggactcaaagccacaccccagtgtccagtgtagccctactccaggccccttcaagccctgtgagtacctctttgaaagctggggcatccgcctggccgtgtgggccatcgtgttgctctccgtgctctgcaatggactggtgctgctgaccgtgttcgctggcgggcctgtccccctgcccccggtcaagtttgtggtaggtgcgattgcaggcgccaacaccttgactggcatttcctgtggccttctagcctcagtcgatgccctgacctttggtcagttctctgagtacggagcccgctgggagacggggctaggctgccgggccactggcttcctggcagtacttgggtcggaggcatcggtgctgctgctcactctggccgcagtgcagtgcagcgtctccgtctcctgtgtccgggcctatgggaagtccccctccctgggcagcgttcgagcaggggtcctaggctgcctggcactggcagggctggccgccgcactgcccctggcctcagtgggagaatacggggcctccccactctgcctgccctacgcgccacctgagggtcagccagcagccctgggcttcaccgtggccctggtgatgatgaactccttctgtttcctggtcgtggccggtgcctacatcaaactgtactgtgacctgccgcggggcgactttgaggccgtgtgggactgcgccatggtgaggcacgtggcctggctcatcttcgcagacgggctcctctactgtcccgtggccttcctcagcttcgcctccatgctgggcctcttccctgtcacgcccgaggccgtcaagtctgtcctgctggtggtgctgcccctgcctgcctgcctcaacccactgctgtacctgctcttcaacccccacttccgggatgaccttcggcggcttcggccccgcgcaggggactcagggcccctagcctatgctgcggccggggagctggagaagagctcctgtgattctacccaggccctggtagccttctctgatgtggatctcattctggaagcttctgaagctgggcggccccctgggctggagacctatggcttcccctcagtgaccctcatctcctgtcagcagccaggggcccccaggctggagggcagccattgtgtagagccagaggggaaccactttgggaacccccaaccctccatggatggagaactgctgctgagggcagagggatctacgccagcaggtggaggcttgtcagggggtggcggctttcagccctctggcttggcctttgcttcacacgtgtaaatatccctccccattcttctcttcccctctcttccctttcctctctccccctcggtgaatgatggctgcttctaaaacaaatacaaccaaaactcagcagtgtgatctatagcaggatggcccagtacctggctccactgatcacctctctcctgtgaccatcaccaacgggtgcctcttggcctggctttcccttggccttcctcagcttcaccttgatactgggcctcttccttgtcatgtctgaagctgtggaccagagacctggacttttgtctgcttaagggaaatgagggaagtaaagacagtgaaggggtggagggttgatcagggcacagtggacagggagacctcacagagaaaggcctggaaggtgatttcccgtgtgactcatggataggatacaaaatgtgttccatgtaccattaatcttgacatatgccatgcataaagacttcctattaaaataagctttggaagagattaaaaaaaaaaaaaaaa

SEQ ID NO: 724 - DNA, 1486 bp, Homo sapiens
  CDS (117)..(1214)
tttcgtcccaggccgccgcgctgccgcccggcctccccgccagcgcgccaccatgggcagtccccggtttccccttgtaaagatggcggtgagggatcgctgcaacctttagactaatgactgtccgaaacatcgcctccatctgtaatatgggcaccaatgcctctgctctggaaaaagacattggtccagagcagtttccaatcaatgaacactatttcggattggtcaattttggaaacacatgctactgtaactccgtgcttcaggcattgtacttctgccgtccattccgggagaatgtgttggcatacaaggcccagcaaaagaagaaggaaaacttgctgacgtgcctggcggaccttttccacagcattgccacacagaagaagaaggttggcgtcatcccaccaaagaagttcatttcaaggctgagaaaagagaatgatctctttgataactacatgcagcaggatgctcatgaatttttaaattatttgctaaacactattgcggacatccttcaggaggagaagaaacaggaaaaacaaaatggaaaattaaaaaatggcaacatgaacgaacctgcggaaaataataaaccagaactcacctgggtccatgagatttttcagggaacgcttaccaatgaaactcgatgcttgaactgtgaaactgttagtagcaaagatgaagattttcttgacctttctgttgatgtggagcagaatacatccattacccactgtctaagagacttcagcaacacagaaacactgtgtagtgaacaaaaatattattgtgaaacatgctgcagcaaacaagaagcccagaaaaggatgagggtaaaaaagctgcccatggtcttggccctgcacctaaagcggttcaagtacatggagcagctgcgcagatacaccaagctgtcttaccgtgtggtcttccctctggaactccggctcttcaacacctccagtgatgcagtgaacctggaccgcatgtatgacttggttgcggtggtcgttcactgtggcagtggtcctaatcgtgggcattatatcactattgtgaaaagtcacggcttctggcttttgtttgatgatgacattgtagagaaaatagatgctcaagctattgaagaattctatggcctgacgtcagatatatcaaaaaattcagaatctggatatattttattctatcagtcaagagagtaactgaaagacctgcgggactgattcacgtggggagaatgttcacagcactgtcacccggcttctccgcaggctttcctcttccccagtggcccactaatggtatcactccgagtctcaatggtctggctgtgttagactctctccttttgtgtttttacatgcagcactactcttggttttatttcagtctgacatagagttaactgcaatcagattgtagtctgatttatatgaataacggttgctaattttaggactgggtgaaagct

SEQ ID NO: 725 - DNA, 1308 bp, Homo sapiens
  CDS (126)..(1109)
aattcggcacgagggtgagggactggagggagtcggagaaaaagctgacctaatgaaactgtggcaacgtcagcgcttgaggcttgaagagggagacaagctaaaagaggatatccagttgtttcatgatggcatttgcacctccaaaaaacacagatggtcccaaaatgcagacaaagatgagcacctggacacccctaaaccatcagctattgaatgaccgggtatttgaagaaagaagagccctgcttggcaaatggtttgacaaatggacagactctcaaagaagaagaatcctcacaggcctgttggagcgctgctcgctgtcccagcaaaagttctgctgtcgaaagcttcaagagaaaattccagcagaagccctggactttacaaccaagcttccaagggtgttatctttatacatcttttctttcctggaccctcggagcctttgtcgttgtgcacaggtgtgctggcattggaagaaccttgctgagctggaccagctctggatgctgaaatgtttacggtttaactggtacatcaatttctctccaactccctttgagcaggggatctggaagaagcactatattcaaatggtgaaagaacttcatattaccaagcctaagacacccccaaaggatggatttgtaatcgctgacgttcaactagttacaagcaattctccagaggaaaaacagtcccctttatcagcttttcggtcctcttcctctttaagaaagaagaataactcaggggagaaagcacttccaccctggcgatcttctgataagcacccaacagatatcattcgttttaattacctagacaaccgtgaccccatggagactgtccagcaaggaagaagaaaaagaaaccaaatgaccccagacttcagccgacagtcacatgataagaaaaataaattgcaggacagaactaggctaagaaaagcacaatcaatgatgtccctaagtgccagctctcccctaaaagttccagctcatctcgcctggcctccccctgagtcagtgggactcccagccactgccaccacagctgaaattctcatgcagcatcctcacaggcaccctgggccccaagcatgactcatccaggttccagagccaaagtggactgaacatggaaagacttttattatagaaatgacaagatgctttgcacagtggagagctgaatttacttggctcccattagaaactctttcagcttaagtacttattgtggtagtgagtcctacggtatttcagtaaaaaggaattcatggcaaaaaaaaaaaaaaaa

SEQ ID NO: 726 - DNA, 5323 bp, Homo sapiens
  CDS (33)..(4523)
cttcacctcagcaagttctggccacgagcctcatggagaaagacgtgggatcaggggatggtgccgagactctgtgcatgaccgtgctggaagaaagcagcatctctctaatgagtagcgtcgtagcagacttctctgaatttgaggaagatcctcaagtatttaatacgcttttcgcctccagacctatcgtcccactttcttctagatccatggaaatctcagagacgagtgttggcatttctgccgaggtggatatgagtagtgttacaaccacacaggttccccctgcccacggccgcctctctgtgccggcgtcacttgatcctactgctggctccttgtctgttgctgaaacccaagtgacgccatccagcgtgaccactgcatttttctcggtcatcaccagcattctccttgactcatctttctctgtcatagcaaacaaaaacacaccgtcgcttgccgtcagagacccgagtgtttttacgccttatagtctggttccttcagtggagtcttcacttttctctgaccaagaacgttccagtttttctgagcataaacccggaggtgctttggattttgcatccagctttttctcaacacccccgctggaactcagcggctccatctcttcgccttcggaagcacctgcgtctctgtctctgatgctgagtgacttgtcccccttcacatctcagtctttttctcccttggttgagacatttacattgtttgactctagtgatctgcagtcatctcagctgtctcttcccagttccacaaatcttgagttttcgcagctccagccaagttccgagctgcctttaaacaccatcatgttgctacctagccgttctgaggtgtcaccatggtcaagcttcccttctgattctctcgagtttgttgaagcgtctacggtttcactgacggattcagaagctcattttacctcagctttcattgaaactacctcctatcttgagtcttcactcatttcccatgaatccgcagtcactgcactggtgccccccggctctgagtcttttgacattttgactgccgggattcaagcaacatcaccattgaccactgtccacacaacgcccattttaactgagtcttctttgttctcaactctgacacctcctgacgaccaaatcagtgctctagacggtcacgtgtctgtcctggcctctttctccaaagccattcccactggtacggtgttgatcactgacgcgtacctgccatcaggatccttgtttgtttctgaagcaacccccttccctctgcccacagagctgaccgtcgtgggcccatcactcacacccacagaggtgccactgaacacctccacggaagtgagcacaaccagcaccggtgctgccactggtggtcccctcgactccaccctgatgggtgacgccgcaagtcagagccccccagagagtagtgctgctcctcccctgccatccctgcgtcccgtgactgccttcactctcgaagcaacagtcgacacaccaacactggctactgccaagccgccatatgtttgtgatatcacagtccccgatgcctatctgatcacaactgtgctggccagaagagctgtgcaggagtacatcattacagcaatcaaagaagtactgaggattcacttcaaccgtgcagtggaactgaaggtttatgaactatttactgacttcacttttctggtaacatccggtcctttcgtttacacggcaatatccgtcataaatgtgcttataaacagtaagcttgtccgtgaccagactcctttaatcctgtctgtgaaaccttctttccttgtgccagagtccaggttccaagttcaaacagtacttcagtttgtgcctccgagtgtggatactggcttctgcaacttcacccagcgcattgagaaaggcctaatgacagctctctttgaagtgagaaaacaccaccagggaacgtataacctcacggtgcagatcttgaatatcaccatcagttcctcaagggtgactcctcggcggggcccggtgaatatcatctttgcggttaaaagcacacagggatttttgaatgggtcggaagtgagcgagctgctcagaaacttgagtgtggtggagttcagtttctatctgggatacccagtgctgcagatcgcagagcccttccagtatccacagctcaacttatctcagttgctgaagtcctcttgggtcagaacagttctcctgggcgtcatggagaagcaactccagaatgaagtgtttcaagccgagatggaacgcaagctggcccagctgctcagcgaggtttccaccagaaggcggatgtggagaagggccactgtagctgcagggaacagtgtggtgcaggtggtaaatgtgtcgaggctggagggagatgacaatcctgtacagctcatctactttgtggaggatcaagatggagaaagactcagtgcagtcaagtcttcggacctgattaacaaaatggacctccagagagcagccatcatcttgggttaccgaattcaaggtgtcattgcccagcctgtcgacagggtgaagaggccgtctccggaatcccagagcaacaacttgtgggtcattgttggcgtggtcatcccagtgctggtggtgatggtgattgttgtcatcctctactggaaactatgccgcacagacaagctagactttcagcctgacactgtggccaacattcagcagcgtcagaagctgcagatccctagtgtgaagggcttcgattttgctaagcagcatctgggtcagcacaataaagacgacatattgattattcatgagccagcgccactgccaggacctctgaaggaccacaccacgccctcggaaaatggagacgtgccaagccccaagtcaaagatcccttccaagaatgttcgtcacagaggaagagtttctccctcagatgctgactctacggtcagtgaagagtccagcgagagggacgcaggagataagacgccgggagccgtcaacgatggcaggtcccacagagctccgcagagcgggccaccactgcccagttcgggaaatgagcagcactcatcagcctccatcttcgagcacgtggacaggatctcccgccccccggaggctagccggcgggtccccagtaagatccagcttatcgccatgcagccgatcccggcacctcccgtccagcgcccctccccagccgaccgagtggcggaaagcaataaaatcaacaaagagattcagaccgcgctgcggcacaagtctgagatcgagcaccatcgcaacaagatccgcctgcgcgccaagcgccgcgggcactacgagttcccggtggtagacgacctgtcctcgggcgacactaaggagcgacaccgggtgtaccgcagggcacagatgcagatcgacaagatcctggaccccacggccagcgtgccctccgtgttcatagagcccaggaagagctcacggataaaacgttctcccaagcctcgccggaaacaccaggtcaacggctgtcctgccgacgctgagaaggaccggctcatcaccacagacagcgatggcacctacaggaggccccccggcgtccacaactcagcctacatcggatgcccatcggatcctgacctcccagccgatgtgcagacaccatcctcggtggaactggggaggtatccagcccttcccttcccggcctcccagtacatcccaccccagccgtccatcgaggaggcacgccagaccatgcactccctcctggacgacgcctttgccctcgtggcccccagcagccagcctgccagcaccgcaggtgtaggccccggagtcccacccggcctgcccgcaaacagcaccccttcccaggaagagaggcgagccacccagtgggggtccttctacagcccagcccagacggccaacaatccctgcagtagatacgaagactatggaatgactcccccgacgggtccattgccaagaccaggttttggccccggtttgctgcagtctacagagctggtgccccctgaccctcagcagccacaggcctccgccgaagccccatttgctgccagagggatctactcggaggagatgccgtcggtggcccggcctcggcctgtcgggggtaccacaggctcccagatccagcacctgacacaggtggggattgccagcagaattggagctcagccagtggaaatcccgccaagcagaggcagccagtatggggggccaggctggccttcgtacggggaggacgaagcggggcgaagagaggccgtgccaaggacttcaggcagggagccctcagctccttccgggaacctcccccaccggggactgcagggccctgggctgggttaccccaccagctccacggaagacctccagcctggccactcctcggcctctctcatcaaagcaatccgcgaggagctcctccggctctcccagaaacagagcaccgtgcagaacttccacagctgatcggcctcgcctcgcagatttgccaagtatccgcttcctgtggaagcaagaccaaaaggaaatcaactgagtgggtgtttggaagaggaaggagcaactctcgggcagcctgcccaagggagggagcaagttgcaatttagaagatgccatacgtcgtgtgacagctcatgagcctttcactgggctggcaattgtctgaacacttgggttcagttgaaatatatgtattttggccaaaagccagcagcacttcacaaaaacaaaacacaaacctaagctaacaaaatgactgcattcgtctcttttttaaaggtagagattaaactgtatagacagcatagggatgaaaggaaccaagcgtttctgtgggattgagactggtacgtgtacgatgaacctgctgctttgttttctgagaagaggtttgaagacattttattaacagcttaatttttctcttttactccataggaacttattttaatagtaacattaacaacaagaatactaagactgtttgggaattttaaaaagctactagtgagaaaccaaatgataggttgtagagcctgatgactccaaacaaagccatcacccgcattcttcctccttcttctggtgctacagctccaagggcccttcaccttcatgtctgaaatggaactttggctttttcagtggaagaatatgttgaaggtttcattttgttctagaaaaaaaaaatccctcccaaagtggggcaaaaagctttatatttatttgattatccaaaatacagatcaaagtttagatctac

SEQ ID NO: 727 - DNA, 3462 bp, Homo sapiens
  CDS (146)..(1621)
tttcgtgcaggggccaggcctctctaggctctccggctgagccgggttggggcccgggttgggccgcccggggactctggagcattgggatttgtagcgcgccctctgggtaggcggctgtagcggagaggcgtgcgggatcgggatgtcggggctgctcacggacccggagcagagagcgcaggagccgcggtaccccggcttcgtgctggggctggatgtgggcagttctgtgatccgctgccacgtctatgaccgggcggcgcgggtctgcggctccagcgtgcagaaggtagaaaatctttatcctcaaattggctgggtagaaattgatcctgatgttctttggattcaatttgttgccgtaataaaagaagcagtcaaagctgcaggaatacagatgaatcaaattgttggtcttggcatttcaacacagagagcaacttttattacgtggaacaagaaaacaggaaatcattttcacaactttataagttggcaagacttaagagctgttgaacttgtaaaatcttggaataattctcttcttatgaagatatttcacagttcttgccgagtgcttcactttttcactagaagtaaacgactttttacagccagtttgttcactttcacaacccagcagacttctttgagattggtctggattttacagaacttgactgaggtgcaaaaggcagttgaagaagaaaattgctgctttgggactattgatacctggttgttatataagctcacaaaaggttctgtatatgccacagatttttcaaatgctagtacaactggactttttgacccatataagatgtgttggagtgggatgattacctctctaatttcgataccactttctctcctacctcctgtgagggacacaagccacaattttggatcagtggatgaagagatatttggtgtgcctataccaatagttgccttggttgctgaccagcaatcagccatgtttggagagtgctgcttccagacaggtgatgtgaaattaaccatgggaactgggacatttttggatattaacactggaaatagccttcaacagactactggaggcttttatccattaattgggtggaagattgggcaagaagtcgtatgcttagctgaaagcaatgcaggagacactggtactgccataaaatgggctcagcagttagaccttttcacagatgctgctgagactgaaaaaatggccaaaagtttggaggattctgaaggagtttgttttgttccatcttttagtggattacaggctccattaaatgacccctgggcatgtgcctcttttatgggtttgaagccttctaccagtaaataccatcttgtacgagcaatattggagtcaatagctttcagaaacaaacagttatatgagatgatgaagaaagagattcatattcctgtaagaaaaatccgggcagatggaggagtttgtaagaatggttttgtcatgcagatgacttcagacctgattaatgagaatatagacagacctgccgacattgacatgtcatgcctgggtgcagcttctctagctggccttgctgttgggtttggagctgacaaggaggaagctaaagaaagttgagacaaagtgaagtggttttcaagccacagaagaaatgtcaggaatatgacaatgagtctggaaaactgggccaaagcagtgaaacgctccatgaattggtataacaaggacataaggactaaatgaaatgatcaaaaccataggtagctggtttatgtgacgtgcagatgagatgaagctcagggataacccatatgacaatgactaagaggagaaaattttaaataagcttcataacttaagaagcattgcttttaaaaaaacaaaacggaacaaaaaactcttatttttttcccctaaaccatggtaaggcagcaatacctcaaaactttatatcttctattttgtagcaaattccaaaggacattagtcatttccaaccacattttgacagttatgggtcctcttcctttttatactgggtcagtggtacataggaacataatgatttaccatccaagctaatagttctgggtcaagtaccatgcacatattgttccaaaattatgtgaaacgtatttctttaattctttaagtgggctatttgaagtacatatagctaaaaagaaagaataactgagaaaatgtggaattttgaaacattaatattttatgtttaaagccataatttcctaatattatatccaaatatgagcttaatatgtccctctcagataagcttatgagatagttaatgctttcctttactggtcttaaagacactgccttaatttttccttgttcaaccaaaatctgagcattctttctatgttgaaaacactgaaaaactaattttagttaatgaactagaaagaatattgatttttaagaaacagaaaaatactacttattttccttctcaaataacgtttctttcaaaaacttctggctgaagtataacatgctggtagttaacataaatcttgtctttctcttgttctttatctttctttgttatttagatgcttgtataaatgtcttttgtttttattaagtgcctaattgacagagcttaatttgaagaagtgccctaatttattgaccacttaagaattgcctttattggggtattttatttgttcctgcgtctttttgatgtttgttcagtctactcatccctgtgagtatgtgtgggggacagctgatagaagggaggagagtgtgtctatgctcaggattgccctttagccactcagccagagatccacagggagcaacaaggacagtttcacatgcttagactttcttggaagaaacagtgaggaggagtaagtcgtgagtagtgtcaagctggatgtagaattgtcctaaggcagttgaccccaccttccaacatgttttcactttatttgcccctccctacatttgggttaggttccatttggatttgcagcaataatgactttatttctctcttggtcaggatttggcacataaaatccttttattatagaactagctattttagttacatagtaatgtaactaatggagagatttatagagaattttgtttttgctgtcatatatgtccattttggagacagatatgatagaactagaaattaagttgcatttctgcaagtgccatttgaatgaacttcaagtatcttcttaattattaaattttctgatgaaggcattgtaacaaatatatagtattattaaatctaattaatatttggaaatattaataaataggtattttatttactgtaaaaagtcaaacttcattatgtagataaatcttattcttttcattctttcccctgtttacatcctttttacaaagcttagtcaccaattaaagctttcctatcaaaatcaaaaaaaaaaaaa

SEQ ID NO: 728 - DNA, 1423 bp, Homo sapiens
  CDS (267)..(872)
aatacagtggggccaaaacaaatggggaaaaagacaaatttagaaaacaaagaaagtagatgctcaactgagccagaaggaagtcactagcaaagaggaaaaaaatagagctctggaaaaatagtgtaaacagtcacaagaaagggaccctgtgtcatgcctgacatctggacaggtatataaagagcccaggctcagggagctccacacctgcacctccctctcacctgctcctctacctgatccaccctcaatctaccagaatcatgggctgctgtggctgctccggaggctgtggctccggctgtgggggttgtggctccggctgtgggggctgtggctctggctgtgggggctatggctctggctgtgggggctgtggctccagctgctgtgtgcccgtctgctgctgcaagcccgtgtgctgctgtgtgccagcctgttcctgctccagctgtggctcctgtgggggctccaagggggactgtggctcttgtgggggctccaaagggggctgtggttcctgtgggggctccaaggggggctgtggctcctgtgggggctccaaggggggctgtggttcttgtgggggctccaaggggggctgtggctcctgtgggggctccaaaggtggctgtggttcctgtgggggctccaaggggggctgtggttcttgtggctgctcccagtgcaattgctgtaagccctgctgctgtccctcaggctgtggatcctgctgccagtccagctgctgcaatccctgctgctgccagtccagctgctgtgtccccgtgtgctgccagtctagctgctgcaagccctgctgctgtcagtccagctgctgtgtccccgtgtgctgccagtgtaagatctgaggctctgaacccagaccttcaggtttcacctgtttggtgaaagcatttgttatgatttccctgaattaattcatcccacgcatcctccctgaggcacctgccccttctccagctcatcatccatgcacgcacctccttccatggctcagctctccactgggccctgccttcagcctcctcactccggaaatgcatgtttccttgatgcaggaggtggccttgcctggacgcgggcacccagccaactgccatggtgttccctgcacttgggtgtggaccatcttcttcttctccctcggctgactgagatgcaaggtctgaccccacaaggccaggccaatgttgtcagtgatcactaagaaccagcttctcaaccaccattgggaccctggatcctccagggccgctcgctgcctgttttccagtggccacctgtgaccaggaaggtctccttccttcctgttgtctccatctatttaaaaacaataacaaagtaatgaatgaatttccttacaataaagcctttcatgtctgtaaaaaaaaaaaaa

SEQ ID NO: 729 - DNA, 1172 bp, Homo sapiens
  CDS (107)..(1078)
gtgccgtgtaattcgccaggcgccggacccagcttcagagctgctgaaatcttggagggaagaaaacacatcccaccctgcctccgggaaggggcctctcctggacatgtctcctgcagctgctgctgagccagatggggaccagcaggacagacacgtcagcaaactcatcttctgcttctttgtcttcggcgccgtcttgttgtgtgtgggagtcctgctctccatctttgggttccaggcatgccaatataagcccctcccagactgccccatggtgctcaaggtggcggggcctgcatgtgccgtggttgggcttggggctgtgatcctggcccgctcccgggcgcaacttcagctccgtgcagggctgcagagaggtcagcagatggaccccgaccgagccttcatctgtggagagagccgccagtttgcccagtgccttatctttgggtttctgttcttgacaagcggcatgctcatcagcgtcctgggcatttgggtccctggatgtggctccaactgggcgcaggaaccgctaaacgagacagacactggcgactcaaagccccggatgtgtgggttcctttctctgcagatcatggggcccttgattgtgcttgtgggattgtgtttcttcgtggttgcccatgttaagaagagaaacacgctgaatgctggccaggatgcctctgagagagaagagggacagatccagattatggagcctgtccaggtcactgtaggtgactcggtaataatatttccaccccctccaccaccttactttcctgaatcttcagcttctgcggtcgctgagagtcctggaactaacagtctgcttccgaatgaaaaccccccttcatattacagtattttcaactatggcaggaccccaacttcagagggtgcagcctctgaaagagactgtgaatctatatataccatttctgggacgaattcatcttctgaggcctcacacactccacatcttccatctgaattgcctcctagatatgaagaaaaagaaaatgctgcagctacattcttgcctctatcttctgagccttccccaccgtaaactatggactctagttcagttttatatgcaatggatcactattttatttaattttttttaaataaaaaatacaatagcaaaaaaaaaaaaa

SEQ ID NO: 730 - DNA, 6088 bp, Homo sapiens
  CDS (55)..(3702)
ccgttgtcagtggcattccattgtttgctagaccttgttcgtggaatcacaagtatgattgaaggagagctaggagagcttgaaacagaatgtctaaccaccaatgaagaaggttcttcaccaacacagtcgacagaacagcaggatttacagtcaacatcagaccaaatggataaggaaattgttagtagggctgtttgggaagaaatggtgaatgcctgctggtgtggtcttcttgctgcactctcactccttcttgatgccagcacagatgaagctgccactgagaatattttaaaagctgaactgactatggctgctctttgtggaagactgggccttgtaacttcaagagatgcctttataactgcaatatgcaaaggttccctgcctccccattatgctcttactgtattgaataccaccactgcagctacactttccaacaaatcatattccgttcagggccaaagtgttatgatgataagtccatcaagtgaatctcaccaacaagttgtggcagtgggtcaacctttagcagtccagcctcaagggacagtaatgctgacttccaaaaatatccagtgtatgaggactttacttaacttggcgcattgccatggggctgttcttggaacatcatggcaacttgtcttggcaactcttcagcatcttgtgtggattctgggattaaagcctagtagtggcggtgccttgaaacctgggagagctgtagaaggacccagtacagttctaacaacagcagtgatgacagatttaccagtgatttccaatatactttcaagattgtttgaaagctcacagtatcttgatgatgtatcactgcatcatttaataaatgcactttgctccttgtctctagaagcaatggatatggcctatggaaataataaggaaccatctctttttgctgttgccaaattgttagaaactggtttagttaatatgcaccgaatagaaattctgtggagacctctgactggccatctacttgaggtctgccagcatccaaactctcgaatgagagaatggggagcagaagctttaacttctcttattaaagcaggattaacatttaaccatgatcctccactctcacaaaaccagaggctgcagttgcttttattgaacccgttaaaggagatgtccaatattaatcatccagatattcgactcaagcagttagaatgcgtgttgcagattctgcagagtcagggagacagtcttgggcctggatggccattagtgcttggagtcatgggagcaatcagaaatgatcaaggagaatccttgatacgaactgcattccagtgtcttcagttggttgtgacagattttctaccaacaatgccttgtacttgcctgcaaatagttgtagatgttgcaggtagctttggcctccataaccaagaactcaatattagtttaacttcaataggtttattgtggaatatttcagattattttttccaaagaggggaaactattgaaaaagaactaaataaggaagaggcagcacagcaaaagcaggcagaagagaaaggagttgttttaaatcggccattccaccctgcaccgccatttgattgcttgtggttatgtctttatgcaaaattgggtgaactatgtgtggatccccgtcctgctgtcaggaagagtgcagggcaaactctgttttctacaattggtgcgcatggaactttattacagcattcaacctggcacactgttatctggaaggtactctttcatctactggacagagttcgagagtcctctaccactgcagacaaagaaaagattgagtctggaggtggcaatattctcattcatcattcaagggacaccgccgagaagcaatgggctgagacgtgggtattaacattggctggagtagcaaggatcttcaacactagaagatatttgctgcagcctttaggagatttttcaagagcttgggatgttcttcttgaccatatacagtcagcagcactcagcaaaaacaatgaagtatctctggctgctctgaaaagcttccaggaaattttacagattgtgtcccctgtcagagactcagataagcctgagacaccacctgtagttaatgtacctgtgcctgttcttatagggcccatatcaggcatgagcaggccatttgtaagaacagattccattggagaaaaactaggaagatatagtagctctgagccacccattgttactgatgagcttgaagatttgaatctatggtgggctgcgtggaatacctggtatagaattggatctgaaagtactaagcctcctattacttttgataaactaacttttattcctagccagccttttcttacagctttaattcagatatttccagctctctaccaacacataaaaactggtttcaatatggatgacttgcaaaagttgggagtcatattgcacagtgctatttcagtcccaataagttcagatgcatccccttttattcttccatcttataccgaagcagttttgacaagtttacaggaagctgtacttacagctttagatgttctccaaaaggccatttgtgtaggaccagaaaacatgcagataatgtatccagctatatttgaccagttgttggcatttgtagaattttcctgtaaacctccacagtatggacagctggaaacaaagcacgttgcaaatgcaaaatataatcagatccaactatttgcaccggcggaatgggtagccttgaattatgtgccgtttgctgaaaggtctttagaagtagttgtggatttataccaaaaaacagcgtgtcacaaagcagtggtgaatgagaaagtgctccagaatattattaagactcttagggttcctctcagtttgaagtattcctgcccttctgaaagcacatggaaactagcagtatcctctctcctcagagttctttctattgggctacctgttgcccggcagcatgcttcttctggaaaatttgacagtatgtggccagaactagccaatacttttgaagattttctctttactaaaagcatacctccagataatctctctattcaagagtttcaaagaaatgaaaatattgatgtcgaggtagttcaacttatcagcaatgagatactaccttatgccaattttattcctaaggaatttgttggtcaaataatgacaatgcttaacaagggctcaatacattctcagtcatcttcatttacagaagcagagattgatattcgtttgagagaggaattttctaaaatgtgttttgaaacattactccagttttccttcagtaataaagtcacaacacctcaagaaggctacatctcacgaatggcactctcagtgcttttaaagagatcccaagatgtactacatcgctatatagaggatgaaagattaagtggtaaatgccctcttccaaggcaacaagtaacagaaattatatttgttttaaaagcagtcagtactcttattgattcacttaagaaaactcagcctgagaatgttgatggaaatacctgggcacaagtaattgccttatacccaactttagtagaatgcatcacctgttcttcttcagaagtctgttctgcacttaaagaggcactagttccttttaaggatttcatgcagccaccagcatccagagttcaaaatggagaatcttgaccggctacaatatatttgaaagcaggaagatagtctaaaaaatgtttgctcctaattgagtcttctgtgagaaggacatttcttactgcagataattcttggcagctgttgttggcctcctttaaattctacttacctgagttcagtaattcatattacaggcttgcacatcaacaaaggctcctgaatgaacagcagtgtaaggctttaataaattaaactgatgggagggataattaacactacagtatacatgctaccatatctccagttggtgatttaaagtgagcttatgtacagtttgtggtgtatgtgttaatgatgtactttttaaaaagaaagaagagatatttcaattcagtcagatttattagtctggtgtttttgcaccctttttcaagtacaaaatcgtactagaattttatgcaagatggtactgtaacattccatattatctataaccagcctttgttaacaaagggaactgatatacttgtgtgtataataaatggtacagttctgtataaaatagtgcatttatttaaattttaaaagtattgataatgttaaatgcttaaagctctatttattattaatacaaaattgtttgcttacatttttacttataatttgccttcatatgtggcggataagctcaccatatgatcatgcagttagcttcatgcttattttaaatgtattattagtgaccattaaacatctgaccagtaaggtcatgtgaacacagcagcaaatagtttatgatttgctgattttggagctttgaaatataggttcttaatacattgatacatattgtagcactatgacttcatcatacctcatttctttaaacagctctccaagctttcactgaagtctgtctgttttttatattggctgtctggattttaaagacttttcatattttatatttctactgattttgtttcccctaacaacatttgtcactgtctttgaattatgacccaggcaagatgatttcagattttctaaaatcttgcctgtgaggttttgttcatatcagtgcttcattttgtaatgtcttctcaagaaaaatacctatgttaactcacaagtataaaatatgtgtgtattataaaacaatgaaaagtgtatttttggagatagtcaagcatttagaagtgcagtgaacttgctgtcacggagtaaaatgctaattatgtttcactttcctagcctagtgaaaaagaaaagtgctcttgagtacaataccttaattatttcttaaaatactgactttgacctagctcactgtattttttatttaatggattatggattacagtatttttcttctgagttaaattttcataatttatgtgaagacacaaagatgtttaaaacaatgattattcataagaaatcatgatggtctcagtattattttagtgtattggaaggtctttgatcttaatagaatttataaatttcagcttctccagaataatcataaaactgcaaaaagatattataattgagtcatgattgagatacagttttgaggctattataattgtataattatttaatttgcattatctgtaaaatgtagtaaggtctttgaggggatattttttatttacatgaattactgaatttctattttattatttcacctaaaattaaggtaaaatatggcatttcataagttctgctttcagcattttccttaaagttgtaaaaaatcaagctatgtacttattttctatatttgggtgtgttaaattgaggattagaaaaatccacataatcactgataaagcattgaaacagaataacccaagggtagtgtaccgattcagtaacatgttaaaaatattgctatgcatttattcaaaggaaaatggtctattcttgagaaataaaagatcagttgcaattaggataattaaatagttaaatatgagtcaagtgtatgcaatatacatttatatgaaccaaagcttgctttatcaggaccatgccctacagttcaaaacataaacatagtgaatgtgttaatatcatataataaggtaataaatgccagtcttagtgtgaagcaagtgggtggcccccttggtagtataattggacaggattttcctccagaatatttcctgtcaccctccaagagtcactacagtaattgattgctggcatggaacacattgcccttgtcttgttagtatgaattgggttctccagtgactagaagaactggggtgtgtgaaagtattcgatgccaggagattcaaaaaggaagctctcaaagataagatcattttatggcacaattgagtctataaccagccctttaagcagtagtaaaaatgtcctttgtcatacttactagaaa

SEQ ID NO: 731 - DNA, 2745 bp, Homo sapiens
  CDS (117)..(2192)
acattgtagaagagaaactactttctgaagaaacagagtgtctgctacgagctcaattttcagattttaagtgggagttatataattggagagaaacagatgagtactccgcagaaatgaaacaatttgcatgtacactctacttgtgcagtagcaaagtctatgattatgtaagaaagattcttaagctgcctcattcttccatcctcagaacgtggttatccaaatgccaacccagtccaggtttcaacagcaacattttttcttttcttcaacgaagagtagagaatggagatcagctctatcaatactgttcattgttaataaaaagtatacctctcaagcaacagcttcagtgggatcctagcagtcacagtttgcaggggtttatggactttggtcttggaaaacttgatgctgatgaaacgccacttgcttcaaaaactgttttgttaatggcagtgggtatttttggccattggagaacacctcttggttatttttttgtaaacagagcatctggatatttgcaggctcagctgcttcgtctgactattggtaaactgagtgacataggaatcacagttctggctgttacatctgatgccacagcacatagtgttcagatggcaaaagcattggggatacatattgatggagacgacatgaaatgtacatttcagcatccttcatcttctagtcaacagattgcatacttctttgactcttgccacttgctaagattaataagaaatgcatttcagaattttcaaagcattcagtttattaatggtatagcacattggcagcacctcgtggagttagtagcactggaggaacaggaattatcaaatatggaaagaataccaagtacacttgcaaatttgaaaaatcatgtactgaaagtgaatagtgccacccaactctttagtgagagtgtagccagtgcattaggatatttgttatccttagacctgccaccttttcaaaactgtattggtaccatccattttttacgtttaattaacaatctgtttgacatctttaatagtaggaactgttatggaaagggacttaaagggcctctgttgcctgaaacttacagtaaaataaaccacgtgttaattgaagccaagactatttttgttacattatctgacactagcaataatcaaataattaaaggtaagcaaaaactaggattcctgggatttttgctcaatgctgagagcttaaaatggctctaccaaaattatgttttcccaaaggtcatgccttttccttatcttctgacttacaaattcagtcatgatcatctggaattatttctaaagatgcttaggcaggtattagtaacaagttctagccctacctgcatggcattccagaaagcttactataatttggagaccagatacaaatttcaagatgaagtttttctaagcaaagtaagcatctttgacatttcaattgctcgaaggaaagacttggcgctttggacagttcaacgtcagtatggtgtcagcgttacaaagactgtctttcacgaagagggtatttgtcaagactggtctcattgttcactaagtgaggcattactagacctgtcagatcataggcgaaatctcatctgttatgctggttatgttgcaaacaagttatcagctcttttaacttgtgaggactgcatcactgcactgtatgcatcggatctcaaagcctctaaaattgggtcactattatttgttaaaaagaagaatggtttgcattttccttcagaaagtctgtgtcgggtcataaatatttgtgagcgagttgtaagaacccattcaagaatggcaatttttgaactagtttctaaacaaagggaattgtatcttcaacagaaaatattatgtgagctttctgggcatattgatctttttgtagatgtgaataagcatctctttgatggagaagtgtgtgccatcaatcactttgtcaagttgctaaaggatataataatctgtttcttaaatatcagagctaaaaatgttgcacagaatcctttaaaacatcattcagagagaactgatatgaaaactttatcaaggaaacactggtcatctgtacaggattataaatgttcaagttttgctaataccagtagtaaattcaggcatttgctaagtaacgatggatatccattcaaatgagagacctaaaatatattaacattttaattaagaatacttgatcaacattttttgaagttcaatttaccatattttataaattgcgcattctgcacagtggacaagtttgcaattctgacttattaaaatttcaaattctgcatatcacaaaatctccttatacttttggtatggcttgcagcatttatgagttttccaaaatatagaaagcagtaggtcagtaggagcaaactagccaacaggtactgtctttgaatttactactgtaagactaagcagtgttactggacacagttttaacttgttcaatctgcttcaaaaacaagaaaaacaacaactatgagttatcaaaatattgactccatttatgactagactacatttctgaaagatctttggtttatgattcttaagaatattgacaatacctataaaactttgaagataacttttacttaaatatgaaaattatagtttgaaaattaggctcaagcaaatatcaaatactgcaaaaatccccttgtcccaggataccctaaaatagaagtgc

SEQ ID NO: 732 - DNA, 2072 bp, Homo sapiens
  CDS (57)..(1445)
tccagagtcccgctgctccgccgcgatattcagtaaaccactgggagtccggcagcatggaggcagcgcgccctcccccgacggcagggaagttcgtggtggtcggcggcggcatcgcgggcgtcacttgtgcggagcagttggctactcactttccatcggaagatattctcttggtaacagcttctcctgttattaaagcagttacaaatttcaagcagatttctaaaatattggaagaattcgatgttgaagaacaatcaagtaccatgttaggaaaacgctttcccaacattaaggttatagaatctggcgtaaagcaactgaagagtgaagaacactgcattgtaacagaagatggcaatcagcacgtatataagaaactctgtctgtgtgctggagctaaaccaaagttgatatgtgaaggaaatccttatgtattaggaatccgtgatacagacagtgctcaggaatttcagaaacagcttactaaagctaaaagaataatgatcatagggaacggtggtattgcacttgagttagtgtatgaaattgaaggctgtgaagtgatttgggccattaaagataaagctatagggaatactttcttcgatgcaggagcagctgaattcttgacttcaaagctcattgctgaaaaatcagaggctaaaattgcacataaaagaaccagatatacaactgaaggaaggaaaaaggaagctagaagcaaatctaaagcagataatgtaggaagtgcattgggaccagattggcatgaaggcttgaatcttaaaggaacaaaagagttttctcataagattcaccttgaaactatgtgtgaagtaaagaaaatctaccttcaggatgagtttagaattttgaagaaaaagtccttcacttttccaagagaccataagtcagttacagctgatacagagatgtggcctgtctatgtggaattgaccaatgaaaagatatatggctgcgatttcattgtcagtgctacaggagttacaccaaatgtagaaccttttctccatggtaacagttttgatctaggagaagatggtggcctgaaagtggatgatcatatgcacacatcccttcctgatatctatgctgccggtgacatctgtactacatcctggcagctgagcccagtctggcagcagatgaggctgtggacccaggctagacagatgggatggtatgcagcaaagtgcatggctgcagcgagttcaggagactctattgacatggatttcagctttgaactgtttgctcatgtgacaaaattttttaactataaggttgtactgctgggaaaatacaatgcacagggcttaggttcagatcatgaattaatgctgagatgtaccaaaggacgaggaatacatcaaagtcgtcatgcaaaatggacgaatgatgggagctgtcttaattggtgaaaccgatttagaagaaacatttgaaaacctaatcttaaaccaaatgaatctttcatcatatggagaagatctgctagatccaaatattgatatagaagattattttgactaaaaatggaatttcttcaggaatcatataaagttccaaatgacaccagaaaaatcacaagtcaataaaatgaatgactgtattgagttaatgatgaccacactgaaaattacagaagtgataatgatattcgtggaaaaatataaaaacataaattctaagtttgaaatcagttcaaagtttatttatagatatatctttccaacacaacactgaccgcttagataaaaatcttaagttatttatttctgtgttttaaacataaatatgtttacttgtgatttagctttggagcaaatttaggtaagttatctacttagccaaatgtactctagtagactagaaccattctttgtgaaatgtcaaaatatggctatggtttcaggaactttaaaatcggttgtattttactttaaatagagatgtagcaatatctcgtttgctaatatttatattgatgacttactccttttttgttgaattgtacttctggttttataacctgaaatcatcta

SEQ ID NO: 733 - DNA, 2241 bp, Homo sapiens
  CDS (41)..(1918)
tttcgtggcgggaaggcgccggccgctaagaagccgaaagatgtccaggtcgggcgcggcggctgagaaggcggactccagacagcgaccccagatgaaggtaaatgaatataaagaaaatcaaaacatcgcttatgtgtctctgagaccagcacagactacagttttaataaaaacagctaaggtctatcttgcccccttttcactcagtaattaccagctagaccagcttatgtgccccaaatccctatcagaaaagaattctaacaatgaagtggcgtgtaagaagactaaaataaagaaaacttgcagaaggattatacctccaaagatgaaaaacacatcttccaaggcagaatccacgctgcaaaattcatcctcagctgttcatactgaaagtaacaagctacaacccaagagaacggcagatgcgatgaatctcagtgttgatgtggaaagtagtcaggatggagacagtgatgaagataccacaccatccctggatttttcgggattgtcaccctacgaaaggaagagactgaagaacatatcagaaaacgcagacttttttgcttctcttcagttgtctgagtctgctgcaagactccgtgaaatgatagagaagagacagcctcctaaatccaaaagaaagaagcctaagagagaaaatgggattggatgtagaaggtcaatgcgattactaaaagttgatccttcgggagtttcattaccagcagctccaacaccgccgacattagtagcagatgaaactcctttgttacctcctgggcctttagaaatgacttctgaaaatcaagaagacaacaatgaacgatttaaaggatttctgcacacatgggcaggaatgagcaagccaagtagtaagaacactgagaagggattatctagcattaaaagctacaaagccaatttaaatggcatggtcattagtgaagataccgtttacaaagttaccacaggcccaatattctctatggctctccatccatcagaaactagaactttggtagcagttggggccaaatttgggcaagttggactttgtgatttgacccagcaacctaaagaagatggagtttatgtttttcatccccatagtcagccagttagctggctttacttttcacccgccaatccggcccacatactgtcactgagctatgatggcacgttacgctggggggatttttccagggctatttttgaagaggtgtatagaaatgaaagaagtagcttttcctccttcgacttcttggcagaagatgcctccactttaatagtaggacactgggatggaaatatgtcactggtggatagacggacacctggaacttcttatgagaaacttaccagttcttctatgggaaaaataagaactgttcatgtccacccagtgcatagacagtattttatcactgccggattgagggatactcatatttatgatgcaaggcgattgaattccaggagaagtcagcctttgatttctttgactgaacatacaaagagcattgcttccgcctatttttcacctcttactggtaacagagtggtgaccacatgtgctgattgtaatctgagaatttttgacagcagctgtatatcttctaagattccgctcctcaccaccatcaggcacaacactttcactgggcgatggctgaccaggttccaagccatgtgggatcctaaacaagaagactgtgtcatagttggcagcatggcccatccacgacgggtagaaatcttccatgagacaggaaagagggtgcattcgtttggtggagaataccttgtctctgtgtgttccatcaatgccatgcacccaactcggtatattttggctggaggtaattccagcgggaagatacatgtttttatgaatgaaaaaagctgctgagtttttggtttaggaacatcaatttgttcaaattgaccactgtctaaggagcctagtaatcggcgtgccttagtgtgtttatgtggtaatgtgttacatttagcaattataacattgttttattaataagactataagaagagtgtacttttagtaagggagaagtcttggagggttgcttctgcaggacggggagggaatttgaggggaggctgaggtgccgtcaggacttttttttttttttttttttaaaaggaatttttctttttgtgcccaaggtggaggggaaatacccgatttttgtttccccaaaccttccc

SEQ ID NO: 734 - DNA, 2763 bp, Homo sapiens
  CDS (592)..(1089)
cccaaaagatctaaacgagggttgctcggaggggagaatacaccagacttgatccaccatttgaggaatccggaggaggtgctctctaagaaatgtccatttatttgagatgatgagaacatgctcattacccgtctggagagtcctgtttgccaacacgcgtgtcatgggctgctgaagagacattccagagcagtacatctgctatatctcccgggacccaccaagtcagaggtggagtgcaaaatatcgtttatgataaggagtgttgcaataatgggagaatgtgcgggttatcatttttcaaaagaaaattattctcatctcaatgccaaaaagatagtttctacacatcacctgcttgctgatgtctatggtgttacagaagtgctacacgggctacagctgaagattggaatactaaagaataaacatcatcctgaccttcatctctgggcttgttccgggaagcgaaaagaccaagatcaaataatagctggggtggagaaaaaaatagctcaagacacagttaatcgagaagaaaaaaaatatgtacagaaccataaagaaccacctcgtttgcccctaaaaatggaaggaacttatataacaagtgagcatagctatcaaaagccacaaagttttggtcaggactgtaaatctctcgcagaccctgggagctcagatgatgatgatgttagtagtttggaagaagaacaagaattccacatgagaagtaaaaacagtttacagtactcagcaaaagaacatggaatgcctgaaaagaatccagctgaagggaatacagtatttgtttataatgataaaaagggcaccgaagacccaggagactcacatcttcagtggcagctcaatctccttacacacatagaaaatgtgcagaacgaagttaccagcaggatggacctaatagaaaaagaagtcgatgttctggaaagctggcttgatttcacaggggagttggagccaccagatcctcttgcaagattgccccaacttaaacgccacataaaacagctcctaattgacatgggcaaagtacagcagatagcaactctttgctctgtatgacaacagtgaacacttaatgaaagaatgtggctttcttcagtcaaagcatttttattatccacgtgatggctaagtggataatttaaaagcttagtaatgtctggtcattcactgatttgtgatgtcaataggatggcaccttggaaagaaaaatgaagaacaactttatcaaggaagctagtatttaaaaacaaattcatgagcaagctgcaaatgagaatgtgttatatgccaaggaacaatgaagtagaatataatgtatactaagggatttcaagttctcagaatttttgagtagttgcttacgtgaagctcaagatacctgtagaaagaaatatggtatatttgtatagtttttaatagaaagatctatgtttataaaccagcacttggccaaaaacaaaattgtaaaggaaatttaaattctggagaattctacagggttgctctaagaactgtcttctcagcagttgatccagctgtacggaaatttagggtatttaaacttttaaaggatcatgagctgtttcttgggcgatgaatgttctcaatcagaaaactgacagtagaaatctcacttctggggaaaacagttgtggaattcttacttcattatgaatgtatttaaaaaacaaacaccaaataattggaatatattgcaggcattaagctcattaaaaacaaactggcttgcagaagggtccgatgtgccaagtgatcatgattctgctggaaagaggattttaaatattgtgggagttctcccaccctaagtcttacataatgccaccagtccatccaaaacctatatatcacctatactatatatatcatatatatagttgaatggcagtattcaggctcaacgtacagtttgatcctgagtatgcttggtgtttgccttcagaaaaaaaaaaatacattgtaaataacctcagctgggatgaggagtgacagaatatcaaaataatttggggctgtggatttttttaactgctagtaggggaatactggaaaagcttcatttctgaagatgaattttatttttaaaaaatacatgcacactcaaaacttttagctttgatcacaaggggacaaatttctgaaaccaaaggcaactaagttgctgggttagctcttgctggattttgagcctaggtcctactgtctgccagtactcatgtgagttgtatgtgcccccagtgctacatacgcaggtatgcgtaagtgtgtatgcttgttttaaacaaacactcaacgtacatatgtacataatctacacatatttatatcacatatctagttttattactatagactatacgaattggtggttaacatgaaatgttaccttttaacagactgtttttaaaaattaaaaatgtatgtataggttttgaaatttttttaaaaggggagaaagactgttaagaggaggctatttgatgacataacacttgaatattttatgcctcattctgtttatcagttctcgcaatctgtataaatgcattttagaactgatagacagtaaacttgaatttatctttgataagaatacatgccactgtacattcagatattatttaaatttgcaaacacattgttctatatgtaagggtactgtatgtaaaactctgtattaaaactattccacataaaaaaaaaaaa

SEQ ID NO: 735 - DNA, 392 bp, Homo sapiens
  CDS (34)..(351)
gcaagtccttctgtgccgatagcactcacgcaaatggtcaactttcttaaaattcactggactttctttaagaagtgtggcaagcatcacccccccaaagtgacccagtacaagaagggaaaggattctctgtatgcccagggaaagcggcgttatgacaggaagcagagtggctatggtgggcagactaagtcgattttccggaaaaaggctgaaaccccaaagaagactgtgttaaggcttgagtgcgttgagcccaactgcagatttaagagaatgctggctattaaaagatgcaagcattttgaactgggaggagataagaagagaaagggccaagtgatccagttttaagtgtcatcttttgttttattatgaagacaataaaatcc

SEQ ID NO: 736 - DNA, 342 bp, Homo sapiens
  CDS (80)..(220)
ttagggctcttcctacagccttgagaagtagataggcatcagagtatggtactataggaatcagaaaaattcaaaacaaatgtggattaagtgtttaggctctatgtggctcacgcagccagaatccttaagtctgtgtgtttctgtgtctcaagactgggctcacattctggctttgtccataacaatgctctgggatttcagggagttccctcatttgtaaaatgagggggtcagagcaggtgatatccatgtttcttccctttctgatattgttgtctgtggcatattctttgtatggcgaatttaataaattatattaatgtgtaaaaaaaaaaaaaa

SEQ ID NO: 737 - DNA, 554 bp, Homo sapiens
  CDS (44)..(286)
aggcaagaattcggcacgaggcaaactcactacccctgacaccatgagctactacggcagctactatggaggcctgggctatggctgtggaggctttggtggcctgggctatggctatggctgtggatgtggcagcttccgcagactgggttctggctgtggctatggaggctacggatatggctctggctttggaggctatggatatggctctggcttcggaggctacggatatggctgctaccgcccatcatactatggaggatatggattctctggattctattaaactactgccccagcaacacaatgtgtgaaattataagaggactttcccagagctgacttcaatcattggacaacaaagatcatgctggagctatttgcacaaaagaatttaacatctcagaatttcaggcaattttttttctctgtatacccacatctctataataatcctagtattctctagttttgcttttaaagctgattgaattatctgtttatcttccaataaaacattctattttcaaacacaaaaaaaaaaaaaaaaa

SEQ ID NO: 738 - DNA, 2327 bp, Homo sapiens
  CDS (640)..(1623)
tccactggtcatcattaactttctggagaaaggatgcttctccccaatacttgatcttgaacttaactatggccggttagtctcctatagctcccaccacatatcctctccttggcgaaaaattcaccctacatactctgtcctggaacatctatctgacccctgctcagattaaggaatttggtgcagtttcaaaagtagacttttctcctcagcctccatataattatgctgtcacagcttcctcaagaattcacatttatggccgatactcccaagaacctataaaaaccttttctcgatttaaagacacagcatactgtgctacttttcgacaagatggtagattgcttgtggctggcagtgaagatggtggagttcaactttttgatataagtgggagggctcccctcaggcagtttgaaggctcatacaaaagcagttcatacagtagattttacagctgacaaatatcacgtggtctctggggctgatgattatacagttaaattatgggatattccaaactccaaagaaattttgacatttaaagaacactctgattatgtgaggggtggatgtgctagcaaacttaatccggatctctttataacaggatcatatgatcatactgtgaagatgtttgatgcacgaacgagtgagagtgttctctccgttgagcatgggcagccagtggagagtgtcctacttttcccctctggaggtcttctggtgtcagcaggaggtcgttatgttaaagtctgggacatgttaaaaggaggacaattgttagtatctttgaaaaatcatcacaaaaccgtgacatgtttatgtctaagcagctctggacagaggttactctctggctcactggataggaaggtgaaagtatacagcacaacttcctacaaagtagtccacagttttgattatgcagcttcaattttgagtcttgcccttgcacatgaagatgagacaatagttgtaggaatgaccaatggaatactgagtgttaaacatcggaaatctgaagcaaagaaggaatcacttcccagaagaagaaggcctgcatatcgaacctttattaaaggaaaaaattacatgaagcaacgggatgacattttgattaacaggccagcaaagaagcacctagaattgtatgacagggatctgaaacattttcggatctctaaggcactcgatagagttcttgatcccacttgtacaataaagacacccgagattacggtgtccatcataaaggagttaaatcgaagaggagtccttgcaaatgcgcttgcaggtcgggatgagaaggaaatcagtcatgttcttaattttttgataaggaatctttctcagccaagatttgcccctgttttaatcaatgctgctgaaataattattgatatatatctgcctgtaattggtcagtcccctgtagttgataaaaagtttttactacttcaaggacttgtagaaaaagagattgattaccaaagagaattgttagaaaccttggggatgatggatatgctttttgccaccatgagaaggaaggaaggcacttctgtgttggaacacacatctgatggatttccagagaataagaagatagaatcatagtgtctgctaaataagacatataagaactctgaagttggaatagatttgactgtattaaatgttggcgagagactctctttgatacattaaaaaaactgtttgcagaagcagttctgtggaagagactggaataattatggccggaaaacaagtacccgttttaagtaagacatggttttccatgtaatattttgaattatagcatcttcacctagaagatctcaattgtcttagtcacagagtaggtttatctgggatggatattaattttaatacaggagtgttctgtatcaacatttgggttggtattcagatgggaattcaaatatgaatcctctctggagagggtccaactgggaatcctgctaaaggagcaaagccttgtattacctctggaagacaacaaaaacaattggcaacaacaaaaagcctctttcttgactttaatcagtgcctttgggatttctaggcccttgcttagcttgcttcctgtctccttgatatctacacttgtcttagatcacatgccctgcttcagctggtaatgggactgcatcggttccaagtgtggcaagtaagttttcggctctgaagaactgacactagctagatttgtattcagagtgtgagagcaagctctacagatagaccttattggactactttttttttttcttcatgcagcctttctaccaagtttg

SEQ ID NO: 739 - DNA, 808 bp, Homo sapiens
  CDS (572)..(727)
tctgttcaaggggacgcattcaccaagtgtccccgttagccaagttagcctgctgtggccagctctttactttttccccccgaagccccttcagctctgttttctctttcggggtcatgaagtttgtccacggcccctactcctgacagcctctgggatgggtgctgcggaggcagcagcagccacacagaaagaggcagatcagcgttgtcacccctacttttgtaaaaggaaatctggtattgccaggctgtgtggttagcgactcacatatgttctcgaaatctcacaaaagccctgtgaggtagaaattattttacccattttataggaaggaaattgagactgagcgagccggcttcggattggctcaaggtcacatatagtcatcattcgaacctcactcagtctgcttctttctgaagtctgtgcagcttaatcacttcagaatgggaaggaaacgggggcccagggaagttaagcaacttgcccactcactcagtctaattggtgcccggggcagggacagaactcactcaattccactgctttccccagtttctggtgagtgatgtgtgcctggcactgtgtgcacctggcactgtgtgtagtaggaatgctgtttcttctgtctgtaacctcctcccagttctgtacacaaagacaaaaccatgccctgcccttaaagcctatagggtcaaatgccactcttgatgatgcttccctataacacatttgtactctatggattgccgtatgcacggaggtttttttgtcatttgcaccttgtggccctggtcggtttccc

SEQ ID NO: 740 - DNA, 4498 bp, Homo sapiens
  CDS (102)..(2585)
ggtgcagtgttggaagctccggttctcccggaagtggcccaggtctctctgtcggggtcccctccatctcgctgctgctgaaggccgcgagggcggcggcgatggcggaggcggcgctgttgctgctgcctgaggcggcggcggagcgggacgctagggaaaagctggctctctgggatcggagaccggacacgacggcgccgctgaccgacaggcagacggactcggtattggagctgaaggcggcggcagagaacttgccggtgccagctgagcttccaattgaagacttgtgcagtttaacatcccagtcactgcccattgaactgacttcagtagtgcctgaatctacagaagacattctcttgaagggcttcacttccttaggaatggaagaagaaagaattgaaaccgcacagcagtttttctcatggtttgcaaagctgcaaactcagatggatcaagatgaaggaactaaatatagacagatgagggattacttgtctgggtttcaggagcagtgtgatgctatattgaatgatgtaaacagtgctcttcagcatctggagtctttgcagaaacagtatctttttgtgtccaataagacaggaaccctacatgaagcctgtgaacagctcctaaaagaacagtcggaacttgttgatctggctgaaaacattcaacaaaagctttcctattttaacgaattggaaactattaacacaaaattgaattcccctacattgtcggtgaatagtgacggatttatacctatgctggccaagttagatgattgtataacatatatctcatctcatcctaattttaaagattatcccatatatttgctgaagtttaaacagtgtctttctaaagctttgcacctcatgaagacatatactgtgaacacactacagaccctcacaagtcagttactgaaaagggatccttcatctgtacctaatgcagacaatgccttcacattattttatgtgaaatttcgagctgctgcccccaaagtcagaactcttattgaacaaatagaactgcggtctgaaaaaatacctgaataccaacaactgctaaatgatatccaccagtgttaccttgatcagcgggagctccttttgggccctagtattgcttgcactgttgcagagttaaccagccaaaataatagagatcactgtgccttggttcgtagtggctgtgccttcatggttcatgtctgccaggatgaacaccaactttacaatgaatttttcacaaaaccaacatcaaaattagatgagcttttggagaaactgtgtgtgtcattgtatgatgtcttcaggccattgatcattcatgttattcacttagagactctgtcggaactttgtgggattcttaaaaatgaagtgcttgaagatcatgtgcagaacaatgctgagcaactgggggcatttgcagctggagtcaagcagatgttagaagatgtacaggagcggctcgtctaccgaacccacatctatattcagacggacatcacgggctataaaccagctcctggagatctggcatatcccgataagttagtcatgatggagcaaattgcacagagtttgaaagatgaacagaagaaggtaccttcagaagcttcattttcagatgttcacttagaagaaggagagtctaacagtctgacaaaatctggttcaacagaatccctcaatcctagaccacagaccacaatttctccagcagatcttcatggaatgtggtatcctacggttcgaagaactcttgtctgtctctccaaattatacagatgcatagatagggcagtgttccaaggattatcacaggaagcattgtctgcctgcattcagtccttacttggagcgtcagagtctatcagcaaaaacaagactcagattgatggacaacttttcttaattaagcaccttttgatacttcgtgaacaaattgctccatttcacactgaattcaccattaaggaaatttccctggacctcaagaaaactagagatgcagcatttaaaatcctgaaccctatgactgtcccaagattttttaggctgaatagcaacaatgccttgatagagttcttgttggagggtactcctgagataagagaacattatcttgactctaaaaaagacgtagaccgtcatctgaaatcggcctgtgagcagtttattcagcagcagaccaagctgtttgtagaacagctggaggagttcatgacaaaggtttcagcgttaaaaacaatggccagtcagggaggccccaagtatactctctcacagcagccttgggcacaaccagcaaaggtcagtgaccttgcggcaactgcatataagacaataaaaacaaagctgcctgtgacattgagaagtatgtccttgtacctatccaataaagataccgagttcatcttgtttaaacctgtgaggaataatattcagcaagtcttccagaagttccacgctctgttaaaggaagagttcagccctgaagacatccagatcattgcctgtccatctatggaacagctgagccttctgctgtcagtttctaaataagcaggccagccgggctgtgcacctaaatgtctgtctgggaggagcaggctgagaagtcttgcagtctgcaggacaccgaggaatcgtatgtgggaacgtccccgagaaccacacgagcgtgctgctcagtgctgactgcagaatgaaatagaagcaaagtgttacaggatcagtgttttcttttctaaaacatcaaaatgccaaagattaatctgtgattggtgataactgcctcgtttaaatggtcacaagaaatgtgaagagagagctagggcagacatgcagtgaaatggttctttgttaaaaatgtgcaataaaaatagattacaataagtagtgcaaagaactttacagaaatcaagcgaattagaaggcctgtaagagtaaggtttgctaaaacgtgaaacactgtaacacttttaaccactgagcattccacagtgaaatgttatttctatgctcttatttaatgtaatgtttctcctgtcatttttgaagttgagtttggagtagattggttgcttctgagaacacattctgccttcctgggaagtcggggtgtcatcctttcctctgtttgatgtgaggtagtttaaagatacaaggactttgtgtgaagctccagcatctgtgccccttgaattgcttaggtgcagacagttctaaagcaaggagctgcagcattctcatcatagatacgtgcagtatctttaatgagtatcttcatggtatgatagtgtgtgtttgtgagtgcgaagtaccaattaaggtgtcttaaatttggcgcatagaggagagaaggaaacctgaggagtagtgttcctcctgaatgaaggttcaggtcaccagccttctgtacactgcctttggttttagcagttctttgaaaagcaaacactttcatgtcctgtctattcattcagctggctgtgctgtgctgtggaccagctgtgtggatctctagcccagctacagcagaatacattttaccagcaaacctaaggatgacaaacactatccacatctgaaaactaccacaccatatcagggatcataaattatgcatatctatgaattttccaacaaattcctacttcctgattggattggttttgccgctgatgttaaggcagccagcttcttagttcaaaaagaattctgagtttttcaaacactagtctagaggtggacattgtcaggggttctggaatgggaccaggggaccttttggtgcagtgggtgcctgtaactcattagacgtactgaggcagcacttctgcagggtgcataccctgattgttgtcatttgtaacaggtcacttccttttcactcagtttaaattggtgatggacgttgcttgattgagcttattactctctattttgagaaggtagaaggtaagagggcccatattcattctttgccatgaaatgaatgaattaggaagattgtatttacttaactgttttttaaatacatgtttaatgaaataaactgtaaaatatccagttttgtgtattatatgtacatttgatttttaatagcctttccaaagaaatgagggcatgattattgtacagtaagtacgtgactgatttaatttgatttacagagcggagtgtgttcttataaaaatatttaatgacattggttcttgtcttttgatcttttatttctgaaacactcaaacaccttacaaagtgctgagtaggtaatagtgacccaacttgtttgctaaatgattatttgtttaaatctgtacagttttaagtgttcacttatacaaagagtgtatatactttcaaataatttaaaatgctttatattatttggctagaaattgctgtttttaataaatgtgaattttttaaaaataaagatttttgcttcctaaaaaaaaaaaaaaaaa

SEQ ID NO: 741 - DNA, 1635 bp, Homo sapiens
  CDS (56)..(391)
  misc_feature (1)...(1635): n = a,t,c or g
atgcttacgccaagcttggcacgagggtgggagaaaggtggtgctgaaaggacagatgctagttgtagtttcactcactcattcattcattagtgcaacagtactgagcaccacctgcactagaggcagaggggtgaacaagatacccttctgcctggggggatgtccacttcccatgggtttggctatttccaggaaagcccctcagtcctccaccctgttctggctgtgtgtgaaggatgtgtgtgagcaggcccaatcctttgcagcaagaatgagaggtcagagtattccattgcacacgcaccctggggctgacagacttgtgccccctagccttcatgcatgcccaagcactggcagctttgcagcccctgccccaccagccccttgacgctcttcttttgttctctcctcggggatgagctctgctgctgagtagggagcttttgcttgctgggaggctctatgcatggatttttttggtgaccatacagctagggctgaggatgggaacagggacagagggcctggctatccctagaagcacttcatccatctttacccacccaaacgggatcccttcacatctcatacccagtaagatgcaagaaaggaatatctgagagcaagcagccctgctccaggggccccaggtatgtgtagaggcccagtgggggtggccacttggtgtttctaccaccccctgccatccagtctggccccagtacctacctgggaggttggtgtacttggcttaagtacttcatgctttattcaggctgcttccccacagcaccggcaggaaatgaaggtgcacttatatgcatccctgcaggaataaagagtgggtggcctgcccagcccagcaccacggcctttccccagccaggagagaccacctaaggatcaaggcagctcctgttttcttggttctgtgacactcgagtctgagccagcccctcaggaattgcctcaaaagagaaaaacaaaaaaaagtcctccttcccaaggcctgctactccaaggtttggctccatcccttgcctttgggtcctgcctatttccccactcctggtctcttatctttggggccaccagtggggagtcacccgggccccaatccctctaaggcgctaagttgaaggaggccttcccagagtgactattggtgccaaagtcccagttcctgttggacttggggtaaaaacaggagatggtgagtgggtgtaaggcccaaatgcccagagaagttaactcgaacccatgggacctgtcccagcctgtcagtccctgatgagtgtaacttccttcccctgggggcctggcccttctctccaacccagtggccatgctttctcacccagccttgtgcccggcctgcatttctgtatatattgctgtgtattgagtgccnnaacacaattnnacaaaaaaaaaacgcccagaaagttaaaaaaatctttcctaggggaataaaccccccatttcttatttttaaaccggcccctccaaaaaaaaaacgccctggaaaaaagggacccccccccccaaaaaaccttcctttttcggcccaaccccaacttttaaaggggggcttggggcgccaaataggaggggggggaaaaaaaaaaa

SEQ ID NO: 742 - DNA, 820 bp, Homo sapiens
  CDS (87)..(470)
tttcgtgcaatcgtgtctggggccccagcccaggctggccggagctcctgtttcccgctgctctgctgcctgcccggggtaccaacatggcccagaagcgtcctgcctgcaccctgaagcctgagtgtgtccagcagctgctggtttgctcccaggaggccaagaagtcagcctactgcccctacagtcactttcctgtgggggctgccctgctcacccaggaggggagaatcttcaaagggtgcaacatagccgtctcagaagggtacaaggatttcagggcaattgctatcgccagtgacatgcaagatgattttatctctccatgtggggcctgcaggcaagtcatgagagagtttggcaccaactggcccgtgtacatgaccaagccggatggtacgtatattgtcatgacggtccaggagctgctgccctcctcctttgggcctgaggacctgcagaagacccagtgacagccagagaatgcccactgcctgtaacagccacctggagaacttcataaagatgtctcacagccctggggacacctgcccagtgggccccagccctacagggactgggcaaagatgatgtttccagattacactccagcctgagtcagcacccctcctagcaacctgccttgggacttagaacaccgccgcccccctgccccacctttcctttccttcctgtgggccctctttcaaagtccagcctagtctggactgcttccccatcagccttcccaaggttctatcctgttccgagcaacttttctaattataaacatcacagaacatcctggaaaaaaaaaaaa

SEQ ID NO: 743 - DNA, 2621 bp, Homo sapiens
  CDS (193)..(2511)
cgggtcgacgacttcgtactaaacaggtgcccaaatgtgagtctgcaaaagctgccagaacagtggctatagactgttttagaggaaattaaatgcagtgatccttcatctaaactctgtgctacaaggcgcagtgctggaattcctttctacatacaggcactgttggcatctgaaccaaagaaaggcagaatggatttgttgaaaataacaatgaaagagttaatctctttggctgggcctacagatgacatacagagtacagtcccccaggttcatgctttaaatatccttagagcattgttcagagatacgcgcctgggagaaaatattattccttatgttgctgatggagctaaggctgcaattctgggttttacatcaccggtctgggcagtgcgaaattcatccacacttctctttagtgccttgatcacaagaatttttggagttaaaagggcaaaggatgaacattccaaaacaaatagaatgacagggagagagtttttctctcgtttcccagaactctatccttttcttctcaaacagttggaaactgtagccaatacagtagacagtgatatgggagaaccaaatcgtcatccaagcatgtttctcttacttttggtgttggagagactctacgcttccccgatggatggtacttcttctgctctcagcatgggaccttttgttcccttcattatgaggtgtggtcactcacctgtctaccactcccgtgaaatggcagctcgtgccttggtcccatttgttatgatagatcacattcctaataccattcgatctctgttgtccacactccccagctgcactgaccagtgtttccggcaaaaccacattcatgggacacttctccaggtttttcatttgttgcaagcctactcagactccaaacacggaacgaattcagacttccagcacgagctgactgacatcactgtttgtaccaaagccaaactctggctggccaagaggcaaaatccatgtttggtgaccagagctgtatatattgatattctcttcctattgacttgctgcctcaacagatctgcaaaggacaaccagccagttctggagagtcttggcttctgggaggaagtcagagggattatctcaggatcagagctgataacgggattcccttgggccttcaaggtgccaggcctgccccagtacctccagagcctcaccagactagccattgctgcagtgtgggccgcggcagccaagagtggagagcgggagacgaatgtccccatctctttctctcagctgttagaatctgccttccctgaagtgcgctcactaacactggaagccctcttggaaaagttcttagcagcagcctctggacttggagagaagggcgtgccacccttgctgtgcaacatgggagagaagttcttattgttggccatgaaggaaaatcacccagaatgcttctgcaagatactgaaaattctccactgcatggaccctggtgagtggcttccccagacggagcactgtgtccatctgaccccaaaggagttcttgatctggacgatggatattgcttccaatgaaagatctgaaattcagagtgtagctctgagacttgcttccaaagtcatttcccaccacatgcagacatgtgtggagaacagggaattgatagctgctgagctgaagcagtgggttcagctggtcatcttgtcatgtgaagaccatcttcctacagagtctaggctggccgtcgttgaagtcctcaccagtactacaccacttttcctcaccaacccccatcctattcttgagttgcaggatacacttgctctctggaagtgtgtccttacccttctgcagagtgaggagcaagctgttagagatgcagccacggaaaccgtgacaactgccatgtcacaagaaaatacctgccagtcaacagagtttgccttctgccaggtggatgcctccatcgctctggccctggccctggccgtcctgtgtgatctgctccagcagtgggaccagttggcccctggactgcccatcctgctgggatggctgttgggagagagtgatgacctcgtggcctgtgtggagagcatgcatcaggtggaagaagactacctgtttgaaaaagcagaagtcaacttttgggccgagaccctgatctttgtgaaatacctctgcaagcacctcttctgtctcctctcaaagtccggctggcgtcccccaagccctgagatgctctgtcaccttcaaaggatggtgtcagagcagtgccacctcctgtctcagttcttcagagagcttccaccagctgctgagtttgtgaagacagtggagttcacaagactacgcattcaagaggaaaggactttggcttgcttgaggctgctggcctttttggaaggaaaggaaggggaagacaccctagttctcagtgtttgggactcttatgcagaatcgaggcagttaactcttccaagaacagaagcggcatgttgaagaaaatctgggggattgggatgggggtatgtgtggatttttcctccactaaatctgcaggaaacatgttgaacataaattcaaaaattttatcccaaaaaaaaaaa

SEQ ID NO: 744 - DNA, 1216 bp, Homo sapiens
  CDS (96)..(656)
gcacgagtttctattgcgcgaggcattgtgggttgctgggcggcccggtctcggagaagaggggagagtggcgggccgctgaataagcttccaaaatgatgcccacaccagttatcctattgaaagaggggactgatagctcccaaggcatcccccagcttgtgagtaacatcagtgcctgccaggtgattgctgaggctgtaagaactaccctgggtccccgtggcatggacaagcttattgtagatggcagaggcaaagcaacaatttctaatgatggggccacaattctgaaacttcttgatgttgtccatcctgcagcaaagactttggtagacattgccaaatcccaagatgctgaggtgggtgatggcaccacctcagtgaccttgctggctgcagagtttctgaagcaggtgaaaccctatgtggaggaaggtttacacccccagatcatcattcgagctttccgcacagccacccagctggcagttaacaagatcaaagagattgctgtgaccgtgaagaaggcagataaagtggagcagaggaagctgctggaaaagtgtgccatgaccgctctgagctccaagctgatctcccagcagaaagctttctttgctaagatggtggtggatgcagtgaatgatgctcgatgattgtgctgcagcttaaaatgatgtggaatcaaagaaggtacaggggtggagccctccgaggattctcagcctggtagcctggttgttgcattcaagaagacctttctcttacgctgggtttggaatgcaacccaaaaaagtaccacaattccaagatggcccttttgaatgttcgagcctcgcagtgcaagctgggaagagcacgtcgcgagtcaaagggccccacaggcgggggagtatccacggggcagggtgatgccccggggcggacatccttctctgaaaaaggtggagcaagagacacgcctctggtggcccacatgggttggtttgcacaacccactaggggatggtggcccacacggaatatgtacgggagaacaatcatgacggccgacacacgcgagggagtcatgaacgacaagcgggttgaggaacacacacaggagccgtcggctgacggagcgcgaggacgaacagagaggcagtagtgtccggaacaacccacgtgcccagaccgtcgcatggtcccgtcagcacggtgagccacccatcct

SEQ ID NO: 745 - DNA, 1042 bp, Homo sapiens
  CDS (104)..(652)
tcagcaccgacccaaacaagcaggaaacaggaaatgttcacgtttcagagaggctgcagcccggggcagcatcctgagcgcgcctctgccgaggcgagcggacatgcaggctccccgcgcagccctagtcttcgccctggtgatcgcgctcgttcccgtcggccggggtaattatgaggaattagaaaactcaggagatacaactgtggaatctgaaagaccaaataaagtgactattccaagcacatttgctgcagtgaccatcaaagaaacattaaatgcaaatataaattctaccaactttgctccggatgaaaatcagttagagtttatactgatggtgttaatcccattgattttattggtcctcttacttttatccgtggtattccttgcaacatactataaaagaaaaagaactaaacaagaaccttctagccaaggatctcagagtgctttacagacatatgaactgggaagtgaaaacgtgaaagtccctatttttgaggaagatacaccctctgttatggaaattgaaatggaagagcttgataaatggatgaacagcatgaatagaaatgccgactttgaatgtttacctaccttgaaggaagagaaggaatcaaatcacaacccaagtgacagtgaatcctaaacctgaatggcgctcatgttttccaagagaagcagcccctgagggagtctgctgaggctgccaacagaggatgaagaggatacaaatttaattaatttcaaatcaacatagacacaagaaccttttgctgtttcttccaacgcccactcttcctaatgatggcatcacttgcacttggaagaatgtgcaattgagaagtactaggaaaaggcctggctgccatccatcgctgcctctgaaggtggagaaggaggccggtgaagttcttacttttgatcaacatgggttggccttctttagccaattttaacttaatgcccttacttctggcaagaaaaagttcggaacctttttggttatttctttggggcctaattaggaactggt

SEQ ID NO: 746 - DNA, 2564 bp, Homo sapiens
  CDS (432)..(2561)
ctcttgaattcatttgctaattgtatgtgtgtgtgtttctgtgggtttctttaaggtttggacagaagggtaaagctattaggattgaaagagtcatctatactggtaaagaaggcaaaagttctcagggatgtcctattgctaagtgggtggttcgcagaagcagcagtgaagagaagctactgtgtttggtgcgggagcgagctggccacacctgtgaggctgcagtgattgtgattctcatcctggtgtgggaaggaatcccgctgtctctggctgacaaactctactcggagcttaccgagacgctgaggaaatacggcacgctcaccaatcgccggtgtgccttgaatgaagagagaacttgcgcctgtcaggggctggatccagaaacctgtggtgcctccttctcttttggttgttcatggagcatgtactacaatggatgtaagtttgccagaagcaagatcccaaggaagtttaagctgcttggggatgacccaaaagaggaagagaaactggagtctcatttgcaaaacctgtccactcttatggcaccaacatataagaaacttgcacctgatgcatataataatcagattgaatatgaacacagagcaccagagtgccgtctgggtctgaaggaaggccgtccattctcaggggtcactgcatgtttggacttctgtgctcatgcccacagagacttgcacaacatgcagaatggcagcacattggtatgcactctcactagagaagacaatcgagaatttggaggaaaacctgaggatgagcagcttcacgttctgcctttatacaaagtctctgacgtggatgagtttgggagtgtggaagctcaggaggagaaaaaacggagtggtgccattcaggtactgagttcttttcggcgaaaagtcaggatgttagcagagccagtcaagacttgccgacaaaggaaactagaagccaagaaagctgcagctgaaaagctttcctccctggagaacagctcaaataaaaatgaaaaggaaaagtcagccccatcacgtacaaaacaaactgaaaacgcaagccaggctaaacagttggcagaacttttgcgactttcaggaccagtcatgcagcagtcccagcagccccagcctctacagaagcagccaccacagccccagcagcagcagagaccccagcagcagcagccacatcaccctcagacagagtctgtcaactcttattctgcttctggatccaccaatccatacatgagacggcccaatccagttagtccttatccaaactcttcacacacttcagatatctatggaagcaccagccctatgaacttctattccacctcatctcaagctgcaggttcatatttgaattcttctaatcccatgaacccttaccctgggcttttgaatcagaatacccaatatccatcatatcaatgcaatggaaacctatcagtggacaactgctccccatatctgggttcctattctccccagtctcagccgatggatctgtataggtatccaagccaagaccctctgtctaagctcagtctaccacccatccatacactttaccagccaaggtttggaaatagccagagttttacatctaaatacttaggttatggaaaccaaaatatgcagggagatggtttcagcagttgtaccattagaccaaatgtacatcatgtagggaaattgcctccttatcccactcatgagatggatggccacttcatgggagccacctctagattaccacccaatctgagcaatccaaacatggactataaaaatggtgaacatcattcaccttctcacataatccataactacagtgcagctccgggcatgttcaacagctctcttcatgccctgcatctccaaaacaaggagaatgacatgctttcccacacagctaatgggttatcaaagatgcttccagctcttaaccatgatagaactgcttgtgtccaaggaggcttacacaaattaagtgatgctaatggtcaggaaaagcagccattggcactagtccagggtgtggcttctggtgcagaggacaacgatgaggtctggtcagacagcgagcagagctttctggatcctgacattgggggagtggccgtggctccaactcatgggtcaattctcattgagtgtgcaaagcgtgagctgcatgccacaacccctttaaagaatcccaataggaatcaccccaccaggatctccctcgtcttttaccagcataagagcatgaatgagccaaaacatggcttggctctttgggaagccaaaatggctgaaaaagcccgtgagaaagaggaagagtgtgaaaagtatggcccagactatgtgcctcagaaatcccatggcaaaaaagtgaaacgggagcctgctgagccacatgaaacttcagagcccacttacctgcgtttcatcaagtctcttgccgaaaggaccatgtccgtgaccacagactccacagtaactacatctccatatgccttcactcgggtcacagggccttacaacagatatatatga

SEQ ID NO: 747 - DNA, 537 bp, Homo sapiens
  CDS (142)..(345)
tttcgtctgaaaaagggggtttgcagaggctgccctggggctggtgctgaaagaagagcccacagctgacttcatggtgctacaataacctcagaatctacttttcactctcaggagaacccacatgtctaatatttagacatgatggcaaactgggcggaagcaagacctctcctcattcttattgttttattagggcaatttgtctcaataaaagcccaggaagaagacgaggatggtgagtttgccatttgctttgcttgtagtgtttattgcacggtttgggaaataggtggaatgttaagcctcaggaagagcgtgaagaggaggttctggtttgaagtttgagaagggggctgacggatttgcacctggaaaacgacttgaaagacaattgggatgtttgtaaatccggagcttctagatccaccgttggagagagtacactactaaatttttctgggaaagcctacaataagtccttttggctgagtgtgagagtgggacgtttaaaatacgaaaagagtgaatgcttag

SEQ ID NO: 748 - DNA, 3342 bp, Homo sapiens
  CDS (227)..(1696)
tttcgtgtctggccggagcccttgggtgaaattgttaggcgtggagagggagtgatgtcttccagactcggtgctgtacccgcctagcaggacccagtgctccataaaggataatagtttccagtacactatccctcatgatgactccttaagtggttcatcgtctgcatcttcgtgtgaaccagtgagtgattttccagcatctttccgaaaatctacctactggatgaagatgagaagaatcaagccagctgctacttctcatgtcgaagggtcaggtggagtatcagccaaggggaaaaggaaacccaggcaggaagaagatgaagactatcgagaatttcctcagaagaagcataagctttatgggaggaagcaacggcctaaaactcagcccaatcccaaatcccaggcccgtcgtattcggaaggaaccaccagtttatgcagcaggcagtttggaggagcaatggtacttaaaaatcgttgataaaggcagtgtctcctgccctacctgccaggcagtggggaggaagaccatagagggtttaaagaaacacatggaaaactgcaagcaggaaatgtttacttgtcatcattgtgggaaacaacttcgttcactggcagggatgaagtatcatgtcatggcaaatcataatagtttgcccattttgaaagccggagatgaaatagatgagccaagtgagagggaaaggctccgaacagttctaaagagactgggaaagctcaggtgcatgcgtgagagttgctccagtagcttcaccagcatcatgggatatctctaccatgtcagaaaatgtggcaaaggggctgcagagctggaaaagatgaccctgaaatgtcaccactgtggaaaaccatataggtcgaaggctggacttgcatatcacctgaggtcagagcatgggcctatatccttctttccagagtcaggacagccagagtgcttaaaggagatgaacctagagtcaaagagtgggggccgagttcagagacgttctgccaagatagctgtataccacctacaggagctggcctctgctgaactggccaaggaatggcccaagaggaaggtgcttcaggacctggtacctgatgatcgaaagttaaaatatactcgtccagggctccctaccttcagccaggaagtactacataaatggaagacagatatcaagaaatatcatcgtattcagtgtcctaaccagggctgtgaggctgtctacagcagtgtatctggccttaaagctcacctgggctcttgtacattgggaaactttgtggctggaaaatacaaatgtcttctatgtcagaaagaatttgtgtcagagagtggtgtcaagtatcacatcaactccgtccatgctgaggactggttcgttgtaaacccaacaacaaccaaaagctttgaaaagctgatgaagataaagcagcggcagcaagaagaagaaaagcggaggcagcagcacaggagcagaaggtctctaagaaggcggcagcagcctggcattgagcttcccgagacagagctgagtcttagagtagggaaggatcagaggaggaataatgaggaactggtagtgtcagcctcctgtaaggaaccagagcaggagccagtgccagcacagttccagaaagtaaagcccccaaagactaatcataaacgaggaaggaaataggcagtcagtgtaaaagtgctcctaggaaagcagatgtgatgctgttgtcacggggacctgtgctgggaggactgagtgaagattctttcagctgtttgtgtaaggctgtgactttctcagctccttcctcctgtgtaaatttcactgtcttcccttcttacattttgattcccccctccccttttagtaggttttcctgctattcctcgtcaagtcctcttgtttttttatcttgcccaaagagctccctctcaaggccaactataggctcctcttgccctgtacaaaactaagaaacctctttggttgtcctttccttcctggggtatagaatgttcttggaagctccattgatttagtagctgctccatcatctagcttgtgaaaccattccaaactaattttttaaaaccataactgatttgtcattttgtatttgtgatataacaagtctagaagttagaactgttgtcattcacataataagattactctgtctccttgggaaaaaaactttatggaggctgtttgtcctctcaatatggttttaagattgaaagtaagaaaacggatttaggatgaaaactctagaactaccctatgctgtttatactgggaaatgctttgtaccaagtagcagtgactagacccacagacatgaaaagcaaccttaggagtaaagtgacccaaacattaaaatgacaggaaagagaaagtagaagcagcaataaatactgccccaactttcctggagcccgaggcctcatccatagctatgatcacttgccctctgaagcttatttttgcttctttggttttaagaattgagaaatatcacattgcccctgatgttttgacagtctcctagtgctcctggtagtgccactaagggaaaaccaaggtgcgcattccttctccctggactttaccttacttgttagtctacgccccactgtttccacccatccccttagccaacctctgtctttttgaattttctgagaatattgtcctatcctcttttatatatggagttctctcctctttatatcctgagactttgacaccagatgtagatatttatctggagctggaaagaaaaattctttttctgtacctcatgcctatctggtaatgtttaatgggttatttctctttgagggtggctttctctggaacattcgttagagcagctttgttgtcgtgtttctggattctcttccccattttgcgtaaatattggtcttatatattcttgcctattttgtggcatatgccacataaaaaatgaacctgatatagacaagtactaccttttcaaattctgaaaggctattaccactttaactctttgtgctcctccaaatagctttaaaatgtgggcttttgtgaagaccactttcaaacaagggagcactgaaacctgaattggatactgccagaataggtagttttgaaacaagttaaggacatggtatatgcactctgcattttcattggcagtgtgcccttaaagccctttcagtagatgagggttgtcagggaggagaaatgaagaagctatgttaatttctggtgagtaagacctggggaatgtttggcaatgacaaaagaaataaatgactctcagaaaaaaaaaaaaa

SEQ ID NO: 749 - DNA, 1867 bp, Homo sapiens
  CDS (1103)..(1675)
tgtcgttgttctgagggcagaatttcccttctaacaaaaagcagcctccaaaatcatttcttttctaacaaaaagcagcctgaaaaatagagcttgaaacatagagataagccagctggaagcctgcacaggggaacgctggcagccgtgccagtagaaaagggccagacatgtcccacacggaggctccatcctcccttttttggttaccacatgtacagtaataaagaaatgggcaacacgctgttcttcttgttatccttccgtggctactgtaaagcatttagagacagtaacaaggagggagcacgttcttccacctgggcaacacgctgttcttcttgttatccttccgtggctactgtaaagcatttagggacagtaacaaggagggagcacgttcttccacctgggcaacacgctgctcttcttgttatccttccgtggctactgtaaagcatttagggacagtaacaaggaaggagcacgttcttccacctgggcaacacggtgttcttcttgttatccttccatggctactgtaaagcatttagggacagtaacaaggagggagcacgttcttccacctgggcaacacgctgttcttcttgttatccttccgtggctactgtaaagcatttagggacagtaacaaggagggagcacgttcttccacctgggcaacacgctgttcttcttgttatccttccctggctactgtaaagcatttagagagagtaacaaggagggagcacgttcttccacctgggcaacacgctgttcttcttgctatccttccgtggctattgtaaagcatttagagacagtaacaaggagggagcacgttcttccacctgggcaacacgctgttcttcttgctatccttccgtggctattgtaaagcatttagagacagtaacaaggaggcagcacgttcttccaccttctgggtgctgctgagcatctttctgggagcagtggccatgctgtgcaaagagaaagggatcaccgtgctgggttggaacgcggtgtttgacatcttggtgagaggcaaattcaatgttctggaaattgtccagaaggtaccacataaggacaagtcatgagagaatcttggcatgctcaggaaccgggactcctcttcagaatgaccctgctcgcctccggaggggctgggatgctctccgtgcgctggaggatcataggcccgggcccgccggccttcaccgaggaggacaactgggcctcctttgctgaccgcgtgctggcgagggccataaacgacaattactcctattcattgaatgcctggctgctgctgctgcgtccctggtggctgtgttttgattggtcagtgggctgcagccccctcatgaagtccctcagcgacgggagggtaactgcatttgcagcgctctggttccgcccaattggcctaatacgccaagccctgtgctctgcagacggccaccagagaaggatccttactctgcgcctgggattgctcgttatcccgtttctccccgcaagtaacctgttcttccgagtgggcttcgtggtcccgagcgtggggtgctgtgtgatgctgctttttggattcggagcctgcgcaaacacaccgagaaaaagaagctcatcgctgccgtggtgctgggaatcctactcagcaagatgctgagaggctgagatgcgcggtgcgcggcggcgagtggcggagcgaggggcggttttcagaggcgctgtgtctgtgtgtcccctcagtgctgaggttcgctgcaacatcggcagaaacttggctgctaaaggcaaccagacgggcgccatcagataccaccgggaagctgtaagcttaaatcccaggacgaaa

SEQ ID NO: 750 - DNA, 669 bp, Homo sapiens
  CDS (55)..(480)
tttcgtcagagccgcgggaggacggttgcctggtactattagcaagcagcaaatatggcggtggcgcgcgtggacgcggctttgcctcccggagaaggatcagtggtcaattggtcaggacagggactacagaaattaggtccaaatttaccctgtgaagctgatattcacactttgattctggataaaaatcagattattaaattggaaaatctggagaaatgcaaacgattaatacagttatcagtagctaataatcggctggttcggatgatgggtgtggccaagctgacgttgcttcgtgtattaaatttgcctcataatagcattggctgtgtggaagggctaaaggaactagtacatctggaatggctgaatttggcaggaaataatcttaaggtgaatggtttcttttttgtttacaaaactattctgcgtaaaaaaaattcaagcaatgtagaaataagtcaaattaaaaagtgaaagtacccactcccactctccagggataatctctgttaaaataaactaaaaataaatctcattttgaaacatataatatgacataatattcttttaaatttgaacaaagaatctatattgtacttagaaaaaagtagatcaaaccatagagtgtttaggagggagactatatcatgctgaattaag

SEQ ID NO: 751 - DNA, 930 bp, Homo sapiens
  CDS (135)..(644)
tttcgtgccctaagctcggcgttccagagagtggggagggggcaagtgtcagtcaggacgggagtccggcgggttacagcggaggcctaggtggcagacagggggcccgggccgctgcgtgttgtccacccaagatggagttcctcctggggaacccgttcagcacaccagtggggcagtgcctcgaaaaggcaacagatggctccctgcaaagtgaggattggacgttgaatatggagatctgtgacatcatcaatgagacggaggaagggccaaaggatgccattcgagccctgaagaagcggctcaacgggaaccggaactacagagaggtgatgctggcattaacagtgctggagacatgtgtgaagaactgtggccaccgcttccacatccttgtggccaaccgagatttcatcgacagtgttctggtcaaaattatatctcccaagaacaaccctcccaccattgtacaggacaaagtgcttgctctgatccaggcatgggctgatgcctttcgaagcagtcctgatctcaccggcgttgtgcacatatatgaggagccatcagcccccgagtcagaactgcttctgtctgtccatacctccaggctctcccggagagggggacggatatttatttcctaaagtttgcacttaattgtgaggattctcaggattgttgggggctactgaaaagaggaatgtgttgaatgtcgcgtttgctgtccactcgtcctagaagtttagtgtttttgtcactgtcatgtgtttctgtgggcagagctggttctggagggtgggtcagtgcacccgaggctcagagcatccatccaccccactggccctccttccagataccctctctctaattgggttcttgcatgtaaaatactccacaataaataaataattgaacaaaaaaaaaaaa

SEQ ID NO: 752 - DNA, 3228 bp, Homo sapiens
  CDS (108)..(2882)
tttcgtggcggagtccaagatggcggcgtgcggttccgctgtgtgaaacgagcgcggggcggcgggttactcagctccgcggagacgacctccgacgacccgcaacaatgaagggaaaagagcgctcgccagtgaaggccaaacgctcccgtggtggtgaggactcgacttcccgcggtgagcggagcaagaagttagggggctctggtggcagcaatgggagcagcagcggaaagaccgatagcggcggtgggtcgcggcggagtctccacctggacaagtccagcagtcgaggtggcagccgcgagtatgataccggtgggggcagctccagtagccgcttgcatagttatagctccccgagcaccaaaaattcttcgggcgggggcgagtcgcgcagcagctcccggggtggaggcggggagtcacgttcctctggggccgcctcctcagctcccggcggcggggacggcgcggaatacaagactctgaagataagcgagttggggtcccagcttagtgacgaagcggtggaggacggcctgtttcatgagttcaaacgcttcggtgatgtaagtgtgaaaatcagtcatctgtcgggttctggcagcggggatgagcgggtagcctttgtgaacttccggcggccagaggacgcgcgggcggccaagcatgccagaggccgcctggtgctctatgaccggcctctgaagatagaagctgtgtatgtgagccggcgccgcagccgctcccctttagacaaagatacttatcctccatcagccagtgtggtcggggcctctgtaggtggtcaccggcacccccctggaggtggtggaggccagagatcactttcccctggtggcgctgctttgggatacagagactaccggctgcagcagttggctcttggccgcctgccccctccacctccgccaccattgcctcgagacctggagagagaaagagactacccgttctatgagagagtgcgccctgcatacagtcttgagccaagggtgggagctggagcaggtgctgctcctttcagagaagtggatgagatttcacccgaggatgatcagcgagctaaccggacgctcttcttgggcaacctagacatcactgtaacggagagtgatttaagaagggcgtttgatcgctttggagtcatcacagaagtagatatcaagaggccttctcgcggccagactagtacttacggctttctcaaatttgagaacttagatatgtctcaccgggccaaattagcaatgtctggcaaaattataattcggaatcctatcaaaattggttatggtaaagcaacacccaccacccgcctctgggtgggaggcctgggaccttgggttcctcttgctgccctggcacgagaatttgatcgatttggcaccatacgcaccatagactaccgaaaaggtgatagttgggcatatatccagtatgaaagcctggatgcagcgcatgctgcctggacccatatgcggggcttcccacttggtggcccagatcgacgccttagagtagactttgccgacaccgaacatcgttaccagcagcagtatctgcagcctctgcccttgactcattatgagctggtgacagatgcttttggacatcgggcaccagaccctttgaggggtgctcgggataggacaccacccttactatacagagatcgtgatagggacctttatcctgactctgattgggtgccacccccacccccagtccgagaacgcagcactcggactgcagctacttctgtgcctgcttacgagccactggatagcctagatcgcaggcgggatggttggtccttggaccgggacagaggtgatcgagatctgcccagcagcagagaccagcctaggaagcgaaggctgcctgaggagagtggaggacgtcatctggataggtctcctgagagtgaccgcccacgaaaacgtcactgcgctccttctcctgaccgcagtccagaattgagcagtagccgggatcgttacaacagcgacaatgatcgatcttcccgtcttctcttggaaaggccctctccaatcagagacagacgaggtagtttggagaagagccagggtgacaagcgagaccgtaaaaactctgcatcagctgaacgagataggaagcaccggacaactgctcccactgagggaaaaagccctctgaaaaaagaagaccgctctgatgggagtgcacctagcaccagcactgcttcctccaagctgaagtccccgtcccagaaacaggatggggggacagcccctgtggcatcagcctctcccaaactctgtttggcctggcagggcatgcttctactgaagaacagcaactttccttccaacatgcatctgttgcagggtgacctccaagtggctagtagtcttcttgtggagggttcaactggaggcaaagtggcccagctcaagatcactcagcgtctccgtttggaccagcccaagttggatgaagtaactcgacgcatcaaagtagcagggcccaatggttatgccattcttttggctgtgcctggaagttctgacagccggtcctcctcttcctcagctgcatcagacactgccacttctactcagaggccacttaggaaccttgtgtcctatttaaagcaaaagcaggcagccggggtgatcagcctccctgtggggggcaacaaagacaaggaaaacaccggggtccttcatgccttcccaccttgtgagttctcccagcagttcctggattcccctgccaaggcactggccaaatctgaagaagattacctggtcatgatcattgtccgtgcaaaactggttgaacagcagatgaagatatggaattcaaagctctaatggacctttttgaagagaagttgtggcttatgtggagtttacatgggcctctgatggaagaaagctaatctgtttagtatttgtgcattttactaaaatggcagcttaaagttgtgtatctgctattgtgatgccaatgccggtgttttaagtggaaaaaaaatgacctctttgatttgtgctgtgtacacaagatttttggaaaagtaaagaaaaaccctttttatggctcacacagcttaagagtagctgtctctcaaacgtgcgctcacagttgagctgcttttgttttattctaaataaattgtttcttttgaggaaaatgttaaacaaaaaaaaaaaa

SEQ ID NO: 753 - DNA, 2153 bp, Homo sapiens
  CDS (698)..(2002)
gctgctgggacgggggaaaggagacgcttcttcctcttgctgctcttctcgttcccgagatcagcggcggcggtgaccgcgagtgggtcggcaccgtctccggctccgggtgcgaacaatgctgactgatagcggagtgcggcggcacctcctttgaggaggacctggactctgtggctccgcgatccgccccagctggggcctcggagccgcctccgccgggaggggtcggtctggggatccgcaccgtgaggctctttggggaggccgggcccagcgtcgggagtcggcagcagcggcggctggcggcagcggcagcggtacgggcggaggggacgcggcgctggatttcaagttggcggctgccgtgctgaggaccgggggtggaggtggtgcctctggcagtgacgaggacgaagtgtccgaggttgaatcatttattttggaccaagaagatctggataacccagtgcttaaaacaacatcagagatattcttatcaagtactgcagaaggagcagacttacgcactgtggatccagagacacaggcacgactagaagcattgctagaagcagcaggaattggcaaattgtcaactgctgatggtaaagcttttgcagatcctgaggtactccggagactgacatcctcagttagttgtgcactggatgaagctgctgctgcactgacacggatgaaagcagaaaacagccacaatgcaggacaagtggacactcgcagtctagcagaagcttgttcagatggggatgttaatgctgttcgtaaattgctagatgaaggcagaagtgtaaatgaacatacagaagaaggagaaagcctgctgtgtttggcttgttcagcagggtattatgaattagcacaagtattgcttgctatgcatgctaatgttgaagatcgagggaataaaggagacataactcccctgatggcagcttccagtggaggttacttagatattgtgaaattattacttcttcatgatgctgatgtcaactcccagtctgcaacaggaaacactgcgctaacttatgcatgtgctggaggatttgttgacattgttaaagtgctccttaatgaaggtgcaaatatagaagatcataatgaaaatggacatactcccttaatggaagcagccagtgcaggtcatgtggaagttgcaagagttcttttagatcatggtgcaggcatcaacactcattctaatgaattcaaagaaagtgctctaacacttgcttgctacaaaggccatttggatatggttcgctttctacttgaagctggtgcagatcaagagcacaaaacagatgagatgcacactgccttaatggaggcctgcatggatggacatgtagaggtggcacgtttgcttttggatagtggtgctcaagtgaacatgcctgcagattcatttgaatctccattgacgctagctgcctgtggaggacatgttgaattggcagctctacttattgaaaggggagcaaatcttgaagaagttaatgatgaaggatacactcccttgatggaagctgcccgggaaggacatgaagaaatggtggcactactcttagcacaaggagcaaatataaatgcccagacagaagaaactcaagaaactgctcttactttggcttgctgtggaggattttctgaagttgcagactttcttattaaggcaggggctgatatagaacttggctgctccacacctctgatggaggcatctcaggagggacacctggaattggttaaatatttgctggcttctggcgctaatgtgcatgctacaacagcaacaggagacacagccttaacctatgcttgtgaaaatggacatacggatgttgcagatgttttacttcaagcaggggctgatttagacaagcaggaggacatgaagactattttggagggcatagatccggccaagcatcaggtgagggtggcctttgatgcttgtaagctactacgtaaagaatagatgttgtaggtaaccagaactctggatatctgaattccagccaagaagttccaggaccctgctgggtgacaaaggaaatcctcttcaattgaaaaagattatgaagtcccaataaaaagagatttgtattgctggtaaaaaaaaaaaa

SEQ ID NO: 754 - DNA, 2520 bp, Homo sapiens
  CDS (1)..(2373)
atgtggttctttgcccgggacccggtccgggactttccgttcgagctcatcccggagcccccagagggcggcctgcccgggccctgggccctgcaccgcggccgcaagaaggccacaggcagccccgtgtccatcttcgtctatgatgtgaagcctggcgcggaagagcagacccaggtggccaaagctgccttcaagcgcttcaaaactctacggcaccccaacatcctggcttacatcgatggactggagacagaaaaatgcctccacgtcgtgacagaggctgtgaccccgttgggaatatacctcaaggcgagagtggaggctggtggcctgaaggagctggagatctcctgggggctacaccagatcgtgaaagccctcagcttcctggtcaacgactgcagcctcatccacaacaatgtctgcatggccgccgtgttcgtggaccgagctggcgagtggaagcttgggggcctggactacatgtattcggcccagggcaacggtgggggacctccccgcaaggggatccccgagcttgagcagtatgaccccccggagttggctgacagcagtggcagagtggtcagagagaagtggtcagcagacatgtggcgcttgggctgcctcatttgggaagtcttcaatgggcccctacctcgggcagcagccctacgcaaccctgggaagatccccaaaacgctggtgccccattactgtgagctggtgggagcaaaccccaaggtgcgtcccaacccagcccgcttcctgcagaactgccgggcacctggtggcttcatgagcaaccgctttgtagaaaccaacctcttcctggaggagattcagatcaaagagccagccgagaagcaaaaattcttccaggagctgagcaagagcctggacgcattccctgaggatttctgtcggcacaaggtgctgccccagctgctgaccgccttcgagttcggcaatgctggggccgttgtcctcacgcccctcttcaaggtgggcaagttcctgagcgctgaggagtatcagcagaagatcatccctgtggtggtcaagatgttctcatccactgaccgggccatgcgcatccgcctcctgcagcagatggagcagttcatccagtaccttgacgagccaacagtcaacacccagatcttcccccacgtcgtacatggcttcctggacaccaaccctgccatccgggagcagacggtcaagtccatgctgctcctggccccaaagctgaacgaggccaacctcaatgtggagctgatgaagcactttgcacggctacaggccaaggatgaacagggccccatccgctgcaacaccacagtctgcctgggcaaaatcggctcctacctcagtgctagcaccagacacagggtccttacctctgccttcagccgagccactagggacccgtttgcaccgtcccgggttgcgggtgtcctgggctttgctgccacccacaacctctactcaatgaacgactgtgcccagaagatcctgcctgtgctctgcggtctcactgtagatcctgagaaatccgtgcgagaccaggccttcaaggccattcggagcttcctgtccaaattggagtctgtgtcggaggacccgacccagctggaggaagtggagaaggatgtccatgcagcctccagccctggcatgggaggagccgcagctagctgggcaggctgggccgtgaccggggtctcctcactcacctccaagctgatccgttcgcacccaaccactgccccaacagaaaccaacattccccaaagacccacgcctgaaggccactgggagacgcaggaggaggacaaggacacagcagaggacagcagcactgctgacagatgggacgacgaagactggggcagcctggagcaggaggccgagtctgtgctggcccagcaggacgactggagcaccgggggccaagtgagccgtgctagtcaggtcagcaactccgaccacaaatcctccaaatccccagagtccgactggagcagctgggaagctgagggctcctgggaacagggctggcaggagccaagctcccaggagccacctcctgacggtacacggctggccagcgagtataactggggtggcccagagtccagcgacaagggcgaccccttcgctaccctgtctgcacgtcccagcacccagccgaggccagactcttggggtgaggacaactgggagggcctcgagactgacagtcgacaggtcaaggctgagctggcccggaagaagcgcgaggagcggcggcgggagatggaggccaaacgcgccgagaggaaggtggccaagggccccatgaagctgggagcccggaagctggactgaaccgtggcggtggcccttcccggctgcggagagcccgccccacagatgtatttattgtacaaaccatgtgagcccggccggcccagccaggccatctcacgtgtacataatcagagccacaataaattctatttcacacccaaa

SEQ ID NO: 755 - DNA, 758 bp, Homo sapiens
  CDS (183)..(755)
acacacctggggaattgctggcctgacttctgacccctgactcctcatacccttcctccagagcatgacatttgaccaccaactgaaacctgacctctgaccccagaccactggcccttcccccgccctgtggtgacttcataaaggttactagcttctcccctggccttgagacccacacgatggccctgctggctctggccagtgccgtcccgtctgccctgctggccctggctgtcttcagggtgcccgcctgggcctgtctcctctgcttcacaacctactctgagcgcctccgcatctgccagatgtttgttgggatgcggagccccaagcttgaagagtgtgaggaggccttcacggccgccttccagggcctctctgacaccgaaatcagtgaggagaccatccacacttcatcagtgtcctggggaagggcgctggggagctgcagcaggagtgtgagcagtgaagaagtaggggcagctctgggtgtagaaagaaccctctggggtcgtgtcaaagatggaccagagggagagtctggaggccgggagaagctggccaaatataacacatcccagggatggatttgggtcataggccaccagctggggtctccagttcaagttggatcctggaattcattgtacaaatacttactgagcacttctaagactgagggccctctccaggatccagaggacacagtgctacagaagaacatgtttatttacttacgagacagacataagtga

SEQ ID NO: 756 - DNA, 1860 bp, Homo sapiens
  CDS (1)..(1857)
atgccttctcaaataggagacaggaagtggcttcatggattacaggcagccctccagaactttctcaagggatatcctgcaattgttcggcaactgcactcagcaggcagaggcaaaagtgacaccagtcaaaagaaacccaaagaacttctggagtcccttctccaagctgacattgttaaatttgcccacttcttgttggatgtcatgaatgtccttagcattctgtcctgtgtcaataagaatagaaattcctcaattgctgacatatttgccactttagagtcaatgctggaaatgctccaaatgtatcaaacaagactagggccaaaagaacgcatggtggattcagccacacactttcatggtaactgcctcagagggaaagaaaacatttctgctgtgagaaacattgttttaacacatcttatcaagagacttcaaggctgtttcagagatgccagccaaaatgtggtgagggctaccgtgattggaagttttaaattgtggcccacaaagataaatcaagaatttggagaaaaagaggtatccatcctgactgcacattatgaaccagtattagaagctgccaatgtgaaacttagtgaagtggatactgaatggagcatgttgaaattagagatttatgccagatttcagaacattcgaaaattgacctgggattttgtgaattccatttacttacacaagtatccaaatatcctgacactagtcgacctagtgttgacccttcctgcaagttcagctgaagcagaacatggctttagtcagatgaaatggaccaagtcacatatgcatgcaaaaatcaaggctgaaagcataataggaaataaagcatttactgacattctgatcgatttggtgaccctgaaccttggcacaaacaactttcctagtaattggatgcaccttacccaacctgaattacaggaattaacatctttattaacagtcaactccgagttcgtggactggcggaagttcctgttagtaacctcaatgccttggcccattcccttggaggaggagctccttgagacccttcagaagttcaaggctgtggataaggagcagttgggcaccatcacttttgagcagtatatgcaggctggtctgtggtttacaggagatgaagatataaaaattccagaaaatcctcttgaaccccttccatttaataggcaggagcatcttatagagtttttctttaggctatttgctgactatgagaaggatccaccccagcttgactacacacagatgctgctttactttgcttgccacccagacaccgtggaaggagtctacagggccctcagtgtggctgttggaactcatgtcttccaacaagtcaaagcttccattccaagtgcagaaaagacctcctcaactgatgcaggtccagctgaggaatttcctgaacctgaggaaaatgctgcaagagaagaaaggaaattaaaaggcgacacggagaaaagggaacagaaggatgaagaaatccctgaaaatgcaaacaatgaaaagatgtccatggaaacactactcaaagtgttcaaagggggaagtgaagcacaggactccaatagatttgccagccacctaaagatagagaacatttatgcagagggcttcataaaaacatttcaagacctaggtgccaagaacctggagccaattgaagtcgctgttctcttgaagcatccttttattcaagacctgatttcaaattattcagactataagtttcctgatattaaaataattctccaaaggagtgaacatgtacaaggaagtgatggagagagatcaccttcaagacatacagaggaaaagaaatga

SEQ ID NO: 757 - DNA, 2068 bp, Homo sapiens
  CDS (215)..(1273)
atggttggtgagagccaggggtccacacagacagttactttggagttccttgaatgggagcaacttgtctttggccaggacagaagacacaggtggctgcggaagagtgaaaggatgccagactatggaactttatcaaaatctacaccagagaatttgttattattaaggaatgatagaaaatggtttttcattggtggaatgagtggtaaagatgggctggaggtttggaagatgccccaagctgggccggcgcgcggggtcggcggagctgtactgcgcgtccgacatctacgaggcggtgtccggggacgcggtggcggtagcgcccgctgtggtggagcctgccgagttggatttcggagagggcgagggccaccacctgcagcacatcagcgaccgcgagatgcccgaagatttagctttggagtcaaacccttctgaccatccaagggcaagcacaattttcctgagcaaatctcaaacggatgtgcgagaaaagaggaagagcaaccatttgaaccatgtatctccagggcagcttactaaaaagtatagctcatgctcaacaatatttctagatgacagcacagtcagccagcctaatcttagaaccacagtaaaatgtgtgaccttagcaatatattaccacataaagaacagagatgcaaatagatccctggatatttttgatgagagatcacatccacttacacgagaaaaagttccagaggaatactttaagcatgatcctgagcacaaatttatttacagatttgttcgtactctttttagtgctgcacagctaacagctgaatgtgcaatagtaactttggtttacttagaaaggcttttaacttatgctgaaatcgacatttgtcccaccaactggaaaaggattgttctgggagccattcttcttgcctccaaggtttgggacgatcaggctgtatggaatgtggactactgccagatcctcaaggacattacagttgaggacatgaatgaaatggaaaggcattttctggagcttcttcagtttaatattaatgttcctgccagtgtttatgccaaatactactttgaccttcgctccttagcagatgacaacaacctgaattttctatttgctcctcttagcaaagaaagagcacagaacctagaggctatttctagattgtgtgaagacaaagacttgtgtagagccgctatgagaaggtctttcagtgctgataacttcattggtattcagcgctctaaagccatcctctcttaaaaggagaaatgaggggttataacgtcatgggaccttcatctacaaagactggagaaataccacctttcctgctcaaaaaccagcaaaattagtgttttcatcaaaaggaaagatctcaaattcaagagactcatggacaacaaggattatactccacaggaaagaatgggaccttgtcaatgcaacaaaacactcttctgtcctttttaatgtaaacagagttacaaaaacccctccaaagtgaaggctcccatcctacacacagatatttgcttactgtgtgggccgatagctgtgaactatgtaaggttttttaaacaatagtttaaatttttaggctttaaagacactaaccatataacttttatgtttcttccagtttctctccctccccccgcattttgctgcatatgcctttaaaatcaatgcagtattaccattaaaacatgggactctaactaaagccacttaggagcagacagcagcgttgttaggtactgaagggttcttcctccctactgttaccattgaagctgctagtcattggcaatcattttaaaccaaaaagctgctggataacatttgtcattcatattctttgcaagcattactttagcattttagcatgtttggggtcataaacagaggaagtatcagttattgatatctacttctattggagtccatgttgcatttcttgtgaactataaatggtgcttctcattttctgataatttttctcttgctaaataaatgtattaaaagatattttcataatgccaaaaaaaaaaa

SEQ ID NO: 758 - DNA, 2192 bp, Homo sapiens
  CDS (31)..(1932)
ctcgcacccttgcccgcgcctggcggcccgatgtggctgcagcagcggctcaaggggctgccgggactgctgtcgagcagctgggcccgccgcctcctctgcctgcttggcctcctgctgctgcttctgtggtttggggggtccggcgcgcggcgggcggcgggcggcctgcacctgctgccctggtcccgcggtgagccgggcgccgccgagccgtctgcctgcctggaggcggccacccgcgcctggcgcggcctgcgggagcgcggtgaggtggtaccgctgggtcctggagtgccggccctggtggccaacggcttcctggccctggacgtggctgccaatcggctgtgggtgactcccggggagcgggagcccgccgtggcgccggactttgtgcccttcgtgcagctgcgcccgctgagcgcgctggctgaagctggagaggcggtgctgctgctgcgggaggggcttctgcgccgcgtgcgttgcctgcagctggggtccccaggtcctggccccgtggccgccggccccgggcccgcctccgtctctggccttgccgcggggtccggccgcgactgcgtgctgctgcaagaggactttctggcgcacaggggccgaccccacgtctacctgcagcgcatccagctcaacaaccccacggagcgcgtggccgcgctgcagactgtggggcccactgccggcccagcccccaaggccttcaccagtaccctggagaaggtcggagaccatcagttcctcctctactcaggccggtccccgcctacgcccactgggttggtgcacctggtggtggtggccgccaagaagctggtgaaccgcctccaagtggctcccaagacgcagctggatgagacggtgctgtgggtggtgcacgtctctggccccattaacccccaggtgctcaaaagcaaagcagccaaggagctcaaggcgctgcaggacttggcacggaaggaaatgctggagctcttggacatgccagcggcggagctgcttcaagaccaccagctcctctgggctcagctcttcagcccaggagtggaaatgaagaagatcactgacacccacacgccgtctggcctcaccgtgaacctgacgctctattacatgctctcctgctcgccagccccactgctcagcccctccctgagccacagggagcgagaccagatggagtcgacgctcaactatgaagatcactgcttcagcgggcacgccaccatgcacgccgagaacctgtggccggggcggctgtcctccgtccagcagatcctgcagctctctgacctgtggaggctgaccctccagaagcgtggctgcaaggggctggtgaaggtgggtgccccaggcatcctgcaggggatggtgctcagctttggggggctgcagttcacagagaaccacctccagttccaggccgaccccgacgtgctgcacaacagctatgcattgcatggcatccgctacaagaacgaccatatcaacctggccgtgctggcggatgccgagggcaagccctacctacacgtgtccgtggagtcccgtggccagcctgtcaagatctatgcctgcaaggcaggctgcctggacgagccagtggagctgacctcggcgcccacgggccacaccttctcggtcatggtgacacagcccatcacgccactgctctacatctccaccgacctcacacacctgcaggacctgcggcacacgctgcacctcaaggccatcctggcccatgatgagcacatggcccagcaggaccccgggctgcccttcctcttctggttcagcgtggcctccctaatcaccctcttccacctcttcctcttcaagctcatctacaacgagtactgtgggcctggagccaagcccctcttcaggagtaaggaagatcccagtgtctgagtgaactaacagtcctgctttcagccaccatttgcacaagacacccagcactgaaagtcccgctgccaggagcaagggatcctttggaagcacccgccctttgtgccttgttgggggaaaccggtgacgcagaagtgagtgtggatacaccagagtttgcattggaaggaatgagtgtcacgtggggagggaaggggccagtggaccttttgtaagctttccactcaataaaatgaacctgtatggcaaaaaaaaaa

SEQ ID NO: 759 - DNA, 866 bp, Homo sapiens
  CDS (153)..(599)
taccttcatcttataagcattagaacatatttcaaaacatatgaggatatatcaaaacatctgaagatatatctggtatttgcccaacagagataattgattctgcaatgtgtgccaaattatatgaaacattcttttaacatctaaaaataatgtttggtatttcctcagatatattttcatttctgctgctagctgccttgggcctcacaattttcattctgttttctgactttcaagttatataccgtggaatggagttgatcccaaccataacatcgtggagggttttaattttggtggtagccctcacccaattctgtgtggctttctttgtagaggattccatccttcaaaatcatgaactctggctgttgatcaaaagagaatttggattctactctaaaagtcaatataggacttggcaaaagaagctagcagaagactcaacctggcctcccataaacaggacagattattcaggtgatggcaaaaatggattctacatcaacggaggctatgaaagccatgaacagattccaaaaagaaaactcaaattgggaggccaacccacagaacagcatttctgggccaggctgtaatcagaattgtcgtcgtacatgctcaacagcattgcttttttccccaaaattaacacattgtggagaagtgatgatactctccccttacctttcctctctccattcaagcattcaaagtatattttcaatgaattaaaccttgcagcaagggaccttagataggcttattctgactgtatgctttaccaatgagagaaaaaaatgcatttcctgtatcatccttttcaataaactgtattcattttgcatagcaaaaaaaaaaaa

SEQ ID NO: 760 - DNA, 1969 bp, Homo sapiens
  CDS (251)..(1966)
aggcctgccccccccggagcccgaacccacgtgcagctactgcgccttcattgatctgcttcgcggtccaggtggcggctgggtggggcctgggcgggacggggcggggacaaggcgggacgaggcggggcccgatgggtcaaatggcccccggtgggggaaggaggagtttcctcttggcctgaacttggctgacctccgcagcttccgcccgactctggctaaagtcttggaggctactgccttgaagatgacctctagggaccagcccagacccaagggccccccgaaaagcacttcgccttgtcctgggatctcgaactctgagagctctccgacgctgaattatcagggcattctaaatcggctcaagcagttccccaggttttctcctcattttgctgcggagttggagagcatttactactcgctgcacaagatccagcaggatgtggcagaacatcacaagcagataggaaacgtcttacagattgtggagagctgcagccaactccagggtttccagtctgaggaggtctcacctgctgaaccagccagccctgggacgccccagcaggtgaaggacaagaccctgcaggagtcgagctttgaggacatcatggccaccaggtcctccgactggctccggcggcctttgggggaggacaatcagccggagacccagctgttctgggacaaggagccttggttttggcacgacactctgaccgagcaactctggcggatttttgccggcgtccacgatgagaaggcaaagcccagagacagacagcaggcaccaggcctggggcaggaaagcaaggcaccaggatcctgtgacccaggaacagacccatgtcctgaagatgcctccacccccaggccacctgaggcctcctccagtccccctgagggttcccaagacaggaacacaagttggggtgtggtccaggagcctcctggaagagcctctcggtttctacagtccatatcctgggaccctgaggactttgaagatgcatggaagaggccagatgccttgcccgggcagtcaaagagactcgccgtcccgtgcaaactggaaaagatgcggatcttggcacacggggagctcgtgctcgccacggccatcagcagcttcacgcggcacgtgttcacctgtggcagaagaggcatcaaggtgtggagcctgactggacaggtggctgaggacaggttccctgagagccacctgcctatacagacccctggggccttcctgcgcacctgcctgctgtcctcaaacagcaggagcctgctcaccggtggctacaacctggccagcgtgagcgtgtgggacctggcggcgccctccctgcatgtgaaggagcagttgccctgtgcaggtctcaactgccaggccctggatgccaacctggatgccaacctggccttcgccagcttcaccagtggtgtggtcaggatctgggacctgcgggatcagagtgtggtcagggacctcaagggttatcctgatggagtcaagagtatcgtggtcaagggctacaacatctggactgggggtccggatgcctgtctgcggtgctgggaccagaggaccatcatgaaacctctggagtaccaattcaagtctcagataatgagcctgtcccacagcccccaggaggactgggtgctgctgggcatggccaatggccagcagtggctgcaaagcaccagcgggagccagcggcacatggtggggcaaaaagacagcgtcatcctgagcgtcaagttctccccctttggccagtggtgggcaagcgttggaatggacgacttccttggcgtctacagcatgccggcggggacaaaagtgttcgaggtgcctgagatgtctccagtcacgtgctgtgacgtctcttccaacaaccgcctcgttgtcacaggctccggggagcacgcctccgtgtaccagatcacctactga

SEQ ID NO: 761 - DNA, 1486 bp, Homo sapiens
  CDS (164)..(1483)
tgtcgttgttctgaggctgtcgttgttctgaggcagttactcgcacaaccccagttaagctgcgctccgggagatacatccagaaagtgcccagaagaaacttcctgctgaaaaaaatgaaaaagcagtatttataacattagaatctggataatttgttaacatggcagaaaataatgaaaatattagtaaaaatgtagatgtaaggcccaaaactagtcggagcagaagtgccgacagaaaagacggttatgtgtggagtggaaagaagttatcttggtcaaaaaagagtgagagttattcagatgctgagacagtgaatggtatagagaaaaccgaagtgtctttaaggaaccaagaaaggaagcacagctgttcatccattgagttggacttagatcattcctgtgggcatcgatttttaggccgatctcttaaacagaaactgcaagatgccgtggggcagtgttttccaataaagaattgtagtagtcggcactcttcagggcttccgtctaaaaggaaaattcatatcagtgaactcatgttagataagtgtcctttcccacctcgatcagatttagcctttaggtggcattttattaaacgacacactgctcctataaattccaaatcagatgaatgggtaagcacagacttgtctcagactgaattgagggatggtcagctaaaacgaagaaatatggaagaaaatataaactgtttctcacataccaatgttcagccctgtgtcataaccaccgacaatgctttgtgtagagaaggtcctatgactggctctgtgatgaacctggtttcaaataacagtatagaagatagtgatatggattccgatgatgaaattctaacactttgcacaagttccagaaaaagaaacaaacccaaatgggatttggatgatgaaatcctgcagttggaaacacctcctaaataccacacgcagattgattatgtccactgtcttgtaccagacctccttcagatcaataacaacccatgttactggggagtgatggataaatacgcagccgaagcactactggaaggaaaaccagagggtacctttttacttcgagactcagcacaggaagactatttattctctgttagttttagacgctatagtcgttctcttcatgctagaattgaacagtggaatcacaactttagctttgatgcacatgacccctgtgtcttccattctcctgacattactgggctcctagaacattataaggacccaagcgcctgtatgttctttgaaccacttctatccactcccttaattcggactttccctttttccctgcagcatatatgcagaacagttatttgtaactgtacaacttatgatggcatcgatgcccttccaattccttcttctatgaaattatatctgaaggaatatcattataaatcaaaagttagagtactcaggattgatgcaccagaacagcaatgctag

SEQ ID NO: 762 - DNA, 1819 bp, Homo sapiens
  CDS (210)..(1289)
aggtgtttacctggcactcaggtgagtggtgcgctctggctgttttctgtcggagccgcccgcctcttccttcagcgcgtcccacaaatcccgacggcacggaggggccccaggccaagggcgatgggcccctgagccctgacaccgcttcgccgctgctgcaggtgcccctggccggcagcgccgccgtggtcccggagcgcggcgacatgccggagctggtggtgaccgcgctgctggcgccgtcgcgcctgtcgctgaagctgctgcgcgccttcatgtggagcctggtgttctcggtggcgctggtggccgcggcggtctacggctgcatagcgctcacgcacgtgctgtgccggccccggcgcggctgctgcgggcgccgtcggagcgcgtcccccgcctgcctgagcgacccctcgctgggtgagcacggtttcctgaacctcaagagctcgggcctgcgtctgcactatgtctcggctggacgaggtaacggacccctcatgctgtttctgcacggcttccctgagaactggttctcctggcgttaccagctccgggagttccagagccgcttccatgttgtggctgtggacttgcgaggctatggcccctcggatgcacctcgggatgtggactgctacacaatcgacctgctgctggtggacatcaaagatgtcatcctaggcctgggttactcgaagtgcatccttgtggcccatgactggggtgccctccttgcctggcatttctccatctactacccatccctggtcgagcggatggttgtggtcagtggtgcccccatgtcggtgtaccaagactattccctgcaccacatcagccagttcttccgttcccactacatgttcctgttccagctgccctggctgcccgagaagctgctgtctatgtctgactttcagattctgaagaccaccctcacccaccgcaagacaggcatcccatgcttgacccccagcgagctcgaggccttcctttataacttctcacagcctggtggcctcactgggcccctcaactactaccgaaacctcttcaggaacttccccctggaaccccaggagctgaccacacccacattgctgctgtggggggagaaggacacttacttggagctggggctggtggaagccatcggcagccgctttgtgccgggccgcttggaggcccacatcctgccaggcatagggcattggatcccacagagcaacccccaggagatgcaccagtacatgtgggccttcttgcaagacctgctggactagtggtccttgctggcctgcccaggaggcatggatactcaggaaggaacacacacccattatctgtgtgtgcctgggagtccatacaatgtccatacatgggtgaactcttgaatcgctcataggcatgggactcctggatcccacacaagcgcacctatgggtgcctcgggacacaccaacccctatactcacacacaggcatggatgcatgtgtgtgtaacaaacactttgaccctgggaactgggtatacctctcttccagtggagccagatgccgagaccgagtgtcccacctcctcccttcctggggcctcactctgcgctttgccaaagtcgcttctctgccatagctgcacagaccttaaaccctgaccttcctgtccctgccttcgacctcctgcctgggtcttcagctcagtgctactctgaatacaatactgctgaccacatttggctacttcaacttaaatgtatgttaattgaaatgaaatacaatgaaaatgcagtgctcagtccaaaaaaaaaaa

SEQ ID NO: 763 - DNA, 1183 bp, Homo sapiens
  CDS (1)..(996)
atggttgacatacatgatcagctccatcaaggaacagtccctgtttcttacacagtaacaacagtggcaccacatgggattccactctgcacaggccagcacatccctgcttgtagtacacagcaggtcccaggatgctctgtggttttcagtggacagcacctccctgtctgtagtgtgcctcctccaatgcttcaggcatgttcagttcagcacttaccagtaccatatgctgcattcccaccccttatttctagtgatccatttcttatacatcctcctcacctttctccccatcatcctcctcatttgccaccaccaggccagtttgtccctttccaaacacagcaatcacgatcgcctctgcaaaggatagaaaatgaagtggaactcttaggagaacatcttccagtaggaggttttacttaccctccatcagcccaccccccaacattacctccatcagctcccttgcagttcttaacacatgatcctttgcatcaggaggtgtcctttggagtaccttatcctccatttatgcctcggaggcttacaggacgtagtagataccgatcccagcagccaataccacctcccccttatcatcccagcttactgccatatgtgttatcaatgcttccagtgccacctgcagtgggcccaactttcagctttgaattagatgtagaagatggagaagtagaaaattacgaggccctgttaaacctggcagagcgactgggagaggcaaagcctcgtggactgactaaagcagatattgaacaacttccttcttatcggttcaatcctaacaaccaccagtcagaacagactttgtgtgtagtatgcatgtgtgattttgagtcaaggcagctacttagagtcttaccctgtaaccacgagttccatgccaagtgtgttgacaaatggcttaaggcaaatcgtacttgcccaatttgccgagctgatgcttcagaagtgcatcgggattcagaatgaccaacctaagaagcacaaatttagtttgggtgttcctcatcacatgtatatacggactatccattgaacttaatctgtgtggcttccagccctccctttaccaaaagggtcaatggacctttctttgcactgtgtgacttaatcaactataaaagcttacaattagtcttcaaaaaaaaaaaaa

SEQ ID NO: 764 - DNA, 1216 bp, Homo sapiens
  CDS (11)..(934)
cgctttcggcatggaggaaatttatgcgaagtttgtgtcccagaaaatcagcaaaacccgctggcgaccgctgcctccgggaagtttacagaccgcggagacgttcgctacaggatcttgggacaatgaggaaaattatatttcactgtggtctattggagattttggaaacttggactctgatggagggtttgaaggagaccatcagttattgtgtgatatcagacaccatggtgatgtaatggatttacagttttttgaccaggaaagaattgtcgctgcttcatcaacaggatgtgtaacagttttccttcaccatccaaataaccagactctgtcagtcaaccagcagtggactacagctcactaccacacaggccctggcagtccttcctatagcagtgcaccatgtacaggtgttgtgtgcaacaacccaaaaatcgttacagttggagaggatggtcgaataaatctcttcacagctgatcacaaggaagctgtaagaaccatagacaatgcagatagtagtacactccatgctgtaacctttcttcgaactcctgagattcttactgtaaattcaattggacagttgaaaatatgggatttcagacaacaaggaaatgagccttctcagatattgtcactgactggtgaccgagtgccactccactgtgttgatagacatcccaaccaacagcatgttgtagctactggtggccaagatggaatgttgagtatttgggatgttagacaaggtactatgcctgtatctctgctgaaggctcatgaagctgaaatgtgggaagttcactttcacccatccaacccagaacatctttttacctgctctgaagatggatccctctggcactgggatgcttccacagatgtacctgaaaagtcgtcactctttcaccaaggtaaaactttttaatgaatactgttatgtgtacttttttttttttttttaaaaaaaaagtttaattttatcccccaggtgggagggaaggggcccaatctgggttcgttgaaccctccccctctggggttaaagaaattttgggccccaacccccccaaaaaccgggaattgttatttttccccccccggccccggtggatttttttgatttttaagggaaaagggggttcacccgggtggcccggccgggcctaaacctccggactcaaaagaacccccctccctggccccc

SEQ ID NO: 765 - DNA, 1897 bp, Homo sapiens
  CDS (308)..(1819)
acttatagaaggaaggcggcgggtgtcagggctatgagtgcttttaaggaaggtctccatagaaggttcccccagcaaagtagggaggggtactccccgagaggagtcgaggtgccggagcctgctgcctcgccgacgctgggaggagccccgtgtcccgccgcgcttgccaagggttggctgcgcgtgcggcgggagtagaggcgccttgcgcaccaggaagtgactgtttccccgccgcagcaaaccaggccatccgctggccttttagtttgccgcctcaggtggatttcagtgtgttctttggatggcaggccttaagagaagagtcccactgcacagcctcagatacttcatctccatggtgggtctcttctccaaaccaggactgcttccctggtatgccagaaatccaccaggatggtcacagctctttctgggcacagtatgtaagggagatttcacccgtgtgatagccacgaaatgtcagaaaggacaaaaaagtcagaagaaaccaagccatcttggaccactagatggttcctggcaggaaaggctggctgatgttgtgacaccactctggaggttgagctatgaagaacagctcaaggtgacatttgcagctcagaacgaaaatttacaaagactagagtcttacatccaaatgctcaatggagtcagtgtgacaacggctgtacccaaatctgagaggctctcttgtcttctccatcctattataccctctcctgtcatcaatggttaccgaaataagtccaccttctctgtgaaccgaggtccagatggcaatccaaagactgtggggttctacctgggaacttggagagatgggaacgttgtctgtgtgcagtctaatcatctgaaaaacatccctgagaaacacagtcaagtggcgcagtactatgaagtattccttcgacagtctccattggagccctgccttgtatttcatgaaggtggatactggcgtgagctcacagtccgcaccaatagccaagggcacacaatggctatcatcactttccatccccagaaattaagtcaggaggagctccatgttcagaaggagattgtaaaggaatttttcatcagaggtcctggagcagcctgtggcttgacctcactttacttccaggaaagtaccatgacccgttgcagccatcagcagtctccctatcagcttctgtttggggaaccctacatctttgaagaacttctgagcttgaagatccgcatctctccagatgcctttttccagattaacacagctggtgcagagatgctgtatcggactgtgggggagctgactggagtgaactctgacaccatccttcttgacatctgctgtggaactggtgtgattggcctctctctggctcagcatacatctcgggtccttgggattgaattgttggagcaggcagtggaggatgcaagatggactgcagccttcaatggcatcaccaactctgaatttcatactggtcaagcagagaagattttgccagggctgctaaagtcaaaggaagatggacagtcaattgttgctgtggtgaacccagcccgtgccggactgcattacaaggtgattcaagccattcgaaacttcagggccatccacacgctagtttttgtttcctgcaagctccatggtgaatccactaggaatgtcattgagctgtgctgtcctccagaccctgctaagaagctcttaggcgagccctttgtcctgcagcaagctgtacctgtggatttgttccctcacaccccacattgtgagctggtgctcctctttactcgataagcagcctcctagaagacagcaggctatttgttaaggctgaagtttcagaaactttcaggtttggcatattgctac

SEQ ID NO: 766 - DNA, 1244 bp, Homo sapiens
  CDS (40)..(696)
ggagcgagctggcggcgccgtcgggcgccgggccgggccatggagctgtggccgtgtctggccgcggcgctgctgttgctgctgctgctggtgcagctgagccgcgcggccgagttctacgccaaggtcgccctgtactgcgcgctgtgcttcacggtgtccgccgtggcctcgctcgtctgcctgctgtgccacggcggccggacggtggagaacatgagcatcatcggctggttcgtgcgaagcttcaagtacttttacgggctccgcttcgaggtgcgggacccgcgcaggctgcaggaggcccgtccctgtgtcatcgtctccaaccaccagagcatcctggacatgatgggcctcatggaggtccttccggagcgctgcgtgcagatcgccaagcgggagctgctcttcctggggcccgtgggcctcatcatgtacctcgggggcgtcttcttcatcaaccggcagcgctctagcactgccatgacagtgatggccgacctgggcgagcgcatggtcagggagaagtgcccatcgtccccgtggtgtactcttccttctcctccttctacaacaccaagaagaagttcttcacttcaggaacagtcacagtgcaggtgctggaagccatccccaccagcggcctcactgcggcggacgtccctgcgctcgtggacacctgccaccgggccatgaggaccaccttcctccacatctccaagaccccccaggagaacggggccactgcggggtctggcgtgcagccggcccagtagcccagaccacggcagggcatgacctggggagggcaggtggaagccgatggctggaggatgggcagaggggactcctcccacggcacctctgggagctgggatgataaagatgaggcttgcggctgtggcccgctggtgggctgagccacaaggcccccgatggcccaggagcagatgggaggaccccgaggccagacgcacactgtccgagccctctgctcagccgcctgggacccaccagggtgcagctgggctccagggtccagcccacaagctgcatcaggctctctgggagaggaggggcctggagggccaggagtcccagactcacgcaccctgggccacagggagccgggaatcggggcctgctgctcctgctggcctggaagactctgtggggtcagcactgtactccgttgctgtttttttataaacacactcttggaagtggcaaaaaaaaaaaaa

SEQ ID NO: 767 - DNA, 614 bp, Homo sapiens
  CDS (1)..(369)
  misc_feature (1)...(614): n = a,t,c or g
atgtcctgcatgtgggtctggctgttcctgctggcactgccctcttctctctcccctcctttcccactctgccctgcttgcccgtcagggtctccggatgcccctgctggaggcagagaagcgttctgtttttatcatcgtccctgtcttggtcctgtccgtgctccccatgtgctcccaatcagttgtcttcgttcctcaacatcagggaaagaaaaaacagcaacacttctccctgtcatcagctctgctgtctccttgtcaggccttgggacgttctctgggctcagtctagggtcgtgcctcatgcctcatgcctctctgggaaggttcccaggggcgccgcctccatggttggctggtgggttttaaaggggaaggttgggaggaggcctgtggaaggaggagggccgtccacacccgtggggcaaagcgtgttccatgaaaccagtgctgtgcgtgctgggatgaaagcctcccagcctctcgtgctgaagggaaaggtggaccgaactggcttanctgctgtggcaatggggtggggggtgagtcctaatcagaaggtgggagaagagaataacaaaatggaactccgccccctgccgccacatttc

SEQ ID NO: 768 - DNA, 305 bp, Homo sapiens
  CDS (2)..(289)
catgaagatcccggtccttcctgccgtggtgctcctctccctcctggtgctccactctgcccagggagccaccctgggtggtcctgaggaagaaagcaccattgagaattatgcgtcacgacccgaggcctttaacaccccgttcctgaacatcgacaaattgcgatctgtgagtacgcttctctggtgctacccccacgaataccctcatcacagaggggataaacgccttggtagagagcttgcaaagctgccacggttccttcaccttctccagagggctgggggctaagctctggcctccc

SEQ ID NO: 769 - DNA, 761 bp, Homo sapiens
  CDS (53)..(601)
ggagtggcctaccggggaccctcccccagagggaccggcccggggcggggagatgaacggcttcagcacggaggaggacagccgcgaagggccccccgccgccccagctgccgccgccccgggctacggccagagctgctgcctcatcgaggacggcgagcgctgcgtccggcccgcgggcaacgcctccttcagcaagagggtccagaagagcatctcgcagaagaaactcaagctggacatcgacaagagcgtaaggcacctatatatctgtgattttcacaaaaatttcatccagagtgtccgaaataaaaggaagaggaagacaagtgacgatggcggagattctcccgagcacgacactgacattcctgaggttgatctgttccagctgcaggtgaacaccctacgacgttataaacgacactacaagttgcagaccagaccaggcttcaataaggcccagttagcagaaactgtgagtcgacacttcaggaacatacctgtgaatgaaaaagagacccttgcctacttcatctacatggtgaagagtaacaagagtagactggaccagaaatcggagggtggcaagcagcttgagtgaggatgaagcacatcttaaaggaatgaagtgtaatgcttgatgcacaggtgatatctactacatttaagcccataaagactgttaaatattattgtaaataaaaaagtttgaatgatgaatactgtaaatctttttggtcaggaggattatattctca

SEQ ID NO: 770 - DNA, 404 bp, Homo sapiens
  CDS (17)..(325)
gttcgcctccggagccatggcggcggcactgaagtgtctactgacattaggaagatggtgccccggccttggagtggctccccaggcccgggcgctcgccgccttagtacccggagtgacccaggtagataacaagtccggtttcctgcagaagaggcctcatcgccagcaccctggcatcctaaagctgccgcacgtgcggctgccacaggcactggctaacggtgcccagttattgctacttgggagcgctgggcccactatggagaatcaggtgtctttttcagacagtttctacctgtatcacccacggtgcagtttgatgtagtagtgccagctttttccttaagtgaactgcccagcaaggctgaccgcactgaggtagttcaaaccttatggcgtac

SEQ ID NO: 771 - DNA, 2590 bp, Homo sapiens
  CDS (190)..(2223)
tttcgtgcacagcggcaccaggctgagctaagcagggccgccttgggcaggcctacgtggtggtgcaggcgagacccaggctgggcaaggcgcagtttcagtttccatcttgggtctctgagctgagcagagtggcaccaggctgagttaagtgggactgccctgggcagacctacctactagagcagaatggagcttcggtcctaccaatgggaggtgatcatgcctgccctggagggcaagaatatcatcatctggctgcccacgggtgccgggaagacccgggcggctgcttatgtggccaagcggcacctagagactgtggatggagccaaggtggttgtattggtcaacagggtgcacctggtgacccagcatggtgaagagttcaggcgcatgctggatggacgctggaccgtgacaaccctgagtggggacatgggaccacgtgctggctttggccacctggcccggtgccatgacctgctcatctgcacagcagagcttctgcagatggcactgaccagccccgaggaggaggagcacgtggagctcactgtcttctccctgatcgtggtggatgagtgccaccacacgcacaaggacaccgtctacaacgtcatcatgagccagtacctagaacttaaactccagagggcacagccgctaccccaggtgctgggtctcacagcctccccaggcactggcggggcctccaaactcgatggggccatcaaccacgtcctgcagctctgtgccaacttggacacgtggtgcatcatgtcaccccagaactgctgcccccagctgcaggagcacagccaacagccttgcaaacagtacaacctctgccacaggcgcagccaggatccgtttggggacttgctgaagaagctcatggaccaaatccatgaccacctggagatgcctgagttgagccggaaatttgggacgcaaatgtatgagcagcaggtggtgaagctgagtgaggctgcggctttggctgggcttcaggagcaacgggtgtatgcgcttcacctgaggcgctacaatgacgcgctgctcatccatgacaccgtccgcgccgtggatgccttggctgcgctgcaggatttctatcacagggagcacgtcactaaaacccagatcctgtgtgccgagcgccggctgctggccctgttcgatgaccgcaagaatgagctggcccacttggcaactcatggcccagagaatccaaaactggagatgctggaaaagatcctgcaaaggcagttcagtagctctaacagccctcggggtatcatcttcacccgcacccgccaaagcgcacactccctcctgctctggctccagcagcagcagggcctgcagactgtggacatccgggcccagctactgattggggctgggaacagcagccagagcacccacatgacccagagggaccagcaagaagtgatccagaagttccaagatggaaccctgaaccttctggtggccacgagtgtggcggaggaggggctggacatcccacattgcaatgtggtggtgcgttatgggctcttgaccaatgaaatctccatggtccaggccaggggccgtgcccgggccgatcagagtgtatacgcgtttgtagcaactgaaggtagccgggagctgaagcgggagctgatcaacgaggcgctggagacgctgatggagcaggcagtggctgctgtgcagaaaatggaccaggccgagtaccaggccaagatccgggatctgcagcaggcagccttgaccaagcgggcggcccaggcagcccagcgggagaaccagcggcagcagttcccagtggagcacgtgcagctactctgcatcaactgcatggtggctgtgggccatggcagcgacctgcggaaggtggagggcacccaccatgtcaatgtgaaccccaacttctcgaactactataatgtctccagggatcctgtggtcatcaacaaagtcttcaaggactggaagcctgggggtgtcatcagctgcaggaactgtggggaggtctggggtctgcagatgatctacaagtcagtgaagctgccagtgctcaaagtccgcagcatgctgctggagacccctcaggggcggatccaggccaaaaagtggtcccgcgtgcccttctccgtgcctgactttgacttcctgcagcattgtgccgagaacttgtcggacctctccctggactgaccacctcattgctgcagtgcccggtttgggctgtagggggcgggagagtctgcagcagactccaggcccctccttcctgaatcatcagctgtgggcatcaggcccaccagccacacaggagtcctgggcaccctggcttaggctcccgcaatgggaaaacaaccggagggccagagcttagtccagacctaccttgtacgcacatagacattttcatatgcactggatggagttagggaaactgaggcaaaagaatttgccatactgtactcagaatcacgacattccttccctaccaaggccacttctattttttgaggctcctcataaaaataaatgaaaaaatgggataaaaaaaaaaaaa

SEQ ID NO: 772 - DNA, 2036 bp, Homo sapiens
  CDS (1)..(1890)
  misc_feature (1)...(2036): n = a,t,c or g
atggatgtccaaggtgatgcccagaaaaaggccttgggcaatgacaggaaggtgctagaagctgcactgtgccagctggcattgaagaggtcagaaccaaagcttgacctcatggacctcgtaggggaagacagaaagtggatgatggcgaggaagctgatgcaggtgaacgacactctgacttccgaagatgccggactccggaacagcaagaactgcaccgaaccagccctgcatgaattccccaatgacatcttcacaaacgaggatagaagacaaggtgcgggggccctccatgtgctctgtgccatatacatgttctatgcgctggccattgtgtgtgatgacttcttcgtcccttccttggaaaagatctgtgagcgcctgcacctcagtgaaaatgtggctggggccacattcatggcagcggaaagttcggccccagagctgttcacatcggtcataggggtcttcatcaccaaaggcgatgtgggagttggcaccatcgtgggctcagcggtattcaacatcctgtgcatcattggtgtctgtgggctctttgctgggcaggttgtggctctttcctcctggtgcctactgagggattctatctactacacgctgtctgtgatcgcgctcatcgtgtttatttatgatgaaaaagtttcctggtgggagtctttagtccttgtgctgatgtatcttatctacattgtcatcatgaaatataacgcttgcatacatcagtgctttgagaggaggacaaaaggtgccgggaacatggtcaacggattggccaacaatgctgaaattgatgacagcagcaactgcgacgcaactgtggtgctacttaagaaagcaaatttccaccgcaaagcatcagtgatcatggtagacgagctgctgtcagcctacccacaccagctttccttctctgaggctggccttcgaatcatgataaccagccactttccccccaagacccggctctccatggccagtcgcatgttgatcaatgagagacaaagattgataaacagcagggcttataccaacggggaatctgaggtggccatcaaaatcccaattaagcacaccgtggagaatgggacagggcccagcagtgccccagacaggggcgtgaatgggacacggagggacgatgttgtggctgaggctggcaacgaaacagagaatgaaaatgaggacaatgagaatgatgaggaggaagaggaggacgaggatgatgatgaaggaccgtacacaccattcgacaccccctcgggtaaactggaaacagtgaaatgggcgttcacctggccgctgagtttcgtcttatacttcactgtacccaactgcaacaagccgcgctgggagaaatggttcatggtgacgtttgcttcctccacgctgtggatcgcagccttctcctacatgatggtgtggatggtcacaatcattggttacaccctggggattcctgacgtcatcatggggatcaccttcctggctgctgggaccagcgtgcctgactgcatggccagcctcattgtggccagacaagggatgggggacatggctgtgtccaactccattgggagcaacgtgtttgacatcctgattggcctcggtctcccctgggctctgcagaccctggctgtggattacggatcctacatccggctgaatagcagggggctgatctactccgtaggcttgctcctggcctctgtttttgtcacggtgttcggcgtccacctgaacaagtggcagctggacaagaagctgggctgtgggtgcctcctcctgtatggtgtgttcctgtgcttctccatcatgactgagttcaacgtgttcacctttgtgaacctgcccatgtgcggggaccactgagccgccgggtgcccanagaggctcagctccttcttttctgtgcaatacgagacccggccgcaccccgagtcaaacaggcccccggggccacggcgttcgtctctcctgtgctgtcctcaggcctccgctcctgttttggtggc

SEQ ID NO: 773 - DNA, 1520 bp, Homo sapiens
  CDS (37)..(1371)
agcgagttgccgagcgcgccccgtccctcgcgcgcgatgctcccctggacggcgctcggcctggccctgagcttgcggctggcgctggcgcggagcggcgcggagcgcggtccaccagcatcagccccccgaggggacctgatgttcctgctggacagctcagccagcgtctctcactacgagttctcccgggttcgggagtttgtggggcagctggtggctccactgcccctgggcaccggggccctgcgtgccagtctggtgcacgtgggcagtcggccatacaccgagttccccttcggccagcacagctcgggtgaggctgcccaggatgcggtgcgtgcttctgcccagcgcatgggtgacacccacactggcctggcgctggtctatgccaaggaacagctgtttgctgaagcatcaggtgcccggccaggggtgcccaaagtgctggtgtgggtgacagatggcggctccagcgaccctgtgggcccccccatgcaggagctcaaggacctgggcgtcaccgtgttcattgtcagcaccggccgaggcaacttcctggagctgtcagccgctgcctcagcccctgccgagaagcacctgcactttgtggacgtggatgacctgcacatcattgtccaagagctgaggggctccattctcgacgcgatgcggccgcagcagctccatgccacggagatcacgtccagcggcttccgcctggcctggccacccctgctgaccgcagactcgggctactatgtgctggagctggtgcccagcgcccagccgggggctgcaagacgccagcagctgccagggaacgccacggactggatctgggccggcctcgacccggacacggactacgacgtggcgctagtgcctgagtccaacgtgcgcctcctgaggccccagatcctgcgggtgcgcacgcggcccggtgaggcagggccgggggcttcgggcccggagtcgggggctgggccggcccccacgcagctcgccgccctccccgccccagaggaggccgggccagagcgcatcgtcatctcccacgcccggccgcgcagcctccgcgtgagttgggccccagcgctgggctcagccgcggcgctcggctaccacgtgcagttcgggccgctgcggggcggggaggcgcagcgggtggaggtgcccgcgggccgcaactgcaccacgctgcagggcctggcgccgggcaccgcctacctggtgaccgtgaccgccgccttccgctcgggccgcgagagcgcgctgtccgccaaggcctgcacgcccgacggcccgcgcccgcgcccacgccccgtgccccgcgccccgaccccggggaccgccagccgtgagccgtaagccggcgtccccgcccagccgagagggccggcgcctacctgagggcccctgtgtcccgaacccggagcggaggcgcccaacccggcagacgggtgcaggcccggcctttccccacgcggactccgcgcgaccccggccctctccct

SEQ ID NO: 774 - DNA, 2816 bp, Homo sapiens
  CDS (90)..(617)
atatcgtcgacccacgcgtccgaggagcccgggaggcggaggcgggaggcggcggcggcgcgcggagacgcagcagcggcagcggcagcatgtcggccggcggagcgtcagtcccgccgcccccgaaccccgccgtgtccttcccgccgccccgggtcaccctgcccgccggccccgacatcctgcggacctactcgggcgccttcgtctgcctggagattctgttcgggggtcttgtctggattttggttgcctcctccaatgttcctctacctctactacaaggatgggtcatgtttgtgtccgtgacagcgtttttcttttcgctcctctttctgggcatgttcctctctggcatggtggctcaaattgatgctaactggaacttcctggattttgcctaccattttacagtatttgtcttctattttggagcctttttattggaagcagcagccacatccctgcatgatttgcattgcaatacaaccataaccgggcagccactcctgagtgataaccagtataacataaacgtagcagcctcaatttttgcctttatgacgacagcttgttatggttgcagtttgggtctggctttacgaagatggcgaccgtaacactccttagaaactggcagtcgtatgttagtttcacttgtctactttatatgtctgatcaatttggataccattttgtccagatgcaaaaacattccaaaagtaatgtgtttagtagagagagactctaagctcaagttctggtttatttcatggatggaatgttaattttattatgatattaaagaaatggccttttattttacatctctcccctttttccctttccccctttattttcctccttttctttctgaaagtttccttttatgtccataaaatacaaatatattgttcataaaaaattagtatcccttttgtttggttgctgagtcacctgaaccttaattttaattggtaattacagcccctaaaaaaaacacatttcaaataggcttcccactaaactctatattttagtgtaaaccaggaattggcacactttttttagaatgggccagatggtaaatatttatgcttcacggtccatacagtctctgtcacaactattcagttctgctagtatagcgtgaaagcagctatacacaatacagaaatgaatgagtgtggttatgttctaataaaacttatttataaaaacaaggggaggctgggtttagcctgtgggccatagtttgtcaaccactggtgtaaaaccttagttatatatgatctgcattttcttgaactgatcattgaaaacttataaacctaacagaaaagccacataatatttagtgtcattatgcaataatcacattgcctttgtgttaatagtcaaatacttacctttggagaatacttacctttggaggaatgtataaaatttctcaggcagagtcctggatataggaaaaagtaatttatgaagtaaacttcagttgcttaatcaaactaatgatagtctaacaactgagcaagatcctcatctgagagtgcttaaaatgggatccccagagaccattaaccaatactggaactggtatctagctactgatgtcttactttgagtttatttatgcttcagaatacagttgtttgccctgtgcatgaatatacccatatttgtgtgtggatatgtgaagcttttccaaatagagctctcagaagaattaagtttttacttctaattattttgcattactttgagttaaatttgaatagagtattaaatataaagttgtagattcttatgtgtttttgtattagcccagacatctgtaatgtttttgcactggtgacagacaaaatctgttttaaaatcatatccagcacaaaaactatttctggctgaatagcacagaaaagtattttaacctacctgtagagatcctcgtcatggaaaggtgccaaactgttttgaatggaaggacaagtaagagtgaggccacagttcccaccacacgagggcttttgtattgttctactttttcagccctttactttctggctgaagcatccccttggagtgccatgtataagttgggctattagagttcatggaacatagaacaaccatgaatgagtggcatgatccgtgcttaatgatcaagtgttacttatctaataatcctctagaaagaaccctgttagatcttggtttgtgataaaaatataaagacagaagacatgaggaaaaacaaaaggtttgaggaaatcaggcatatgactttatacttaacatcagatcttttctataatatcctactactttggttttcctagctccataccacacacctaaacctgtattatgaattacatattacaaagtcataaatgtgccatatggatatacagtacattctagttggaatcgtttactctgctagaatttaggtgtgagattttttgtttcccaggtatagcaggcttatgtttggtggcattaaattggtttctttaaaatgctttggtggcacttttgtaaacagattgcttctagattgttacaaaccaagcctaagacacatctgtgaatacttagatttgtagcttaatcacattctagacttgtgagttgaatgacaaagcagttgaacaaaaattatggcatttaagaatttaacatgtcttagctgtaaaaatgagaaagtgttggttggttttaaaatctggtaactccatgatgaaaagaaatttattttatacgtgttatgtctctaataaagtattcatttgataaaaaaaaaaaaa

SEQ ID NO: 775 - DNA, 1194 bp, Homo sapiens
  CDS (130)..(966)
gcggaggcgacagtgtctagcgggagctccgcgtgtagctacgccggccgcctggctttgagacaacgtgattctccgcagctggtcgcctacccgtgatgttctgcccacgtcgagacctgagctgaaatggcagacgatctcggagacgagtggtgggagaaccagccgactggagcaggcagcagcccagaagcatcagatggtgaaggagaaggagacacagaagtgatgcagcaggagacagttccagttcctgtaccttcagagaaaaccaaacagcctaaagaatgttttttgatacaaccaaaggaaagaaaagagaataccaccaagaccaggaaaagaagaaagaagaaaattactgatgttcttgcaaaatcagaaccaaaaccagggttacctgaagacctacagaagctgatgaaggactattatagcagcagacgcttggtgattgaattagaagaactgaacctgccagactcctgtttcctcaaggccaatgatttgactcacagtctttcctcatacctaaaagaaatttgtcctaagtgggtaaaacttaggaagaaccacagtgagaagaaatcggtcctgatgctgatcatctgcagctcggccgtccgagccctggagctcattaggtcgatgacagcattcagaggagacggcaaagttataaaattatttgcaaagcacataaaggtccaggcgcaggtaaagttgctggagaagcgtgtggtgcacctgggtgtaggaactccggggagaattaaagaacttgttaaacaaggtggccttaatttgagccccttaaaatttctggtttttgactggaactggagagatcagaagttgaggagaatgatggacattcccgagataagaaaggaggtattcgaacttctggaaatgggagtgctcagtctgtgcaagtcagaatccttgaaactgggccttttctaagtctgtgtcctaatgaagattccagttttcacagtagaagttgcatcttatttaatgactctgatacattgcaagcactcagtaaatatcagcaaatagtttatgttaattgtgtcaacagatggatcactggaatgtggggattctgaaacagaaatgaaactgtccttttgacaactctcttatataataaagtatcaccggcttgtgtatgaaaaaaaaaaa

SEQ ID NO: 776 - DNA, 1498 bp, Homo sapiens
  CDS (64)..(1374)
aaaatccgaagccttcatacagatgccttgaagaaactggctgttaaatgcgaagaccttttcatggctgggcagaaagaccagctccgttttggagtggacagctggtcagacttcaggctaaccagtgacaaaccatgttgtgaggcaggtgatgcggtttactatactgcttcatatgcaaaagatccacttaataactatgcagtcaagatctgtaagagcaaagctaaagaatctcagcagtattatcacagcttggctgtccggcagagtctggctgtccattttaacattcagcaggactgtggtcatttccttgctgaagtccctaaccgtctgcttccctgggaggatccagatgaccctgaaaaggatgaggatgacatggaagagactgaagaagacgccaaaggagaaacggatgggaaaaacccaaagccctgttctgaagcagcatcatcccagaaagagaatcagggagtcatgagcaagaagcagaggagccacgttgtggtcatcaccagggaggttccatgtcttactgtggctgattttgtgcgagactctctggcccagcatgggaaaagccctgatttgtatgagaggcaggtgtgtctgctgctcttacagctatgctctggtcttgagcacctcaaaccctaccatgtcactcactgcgatctacgcctagagaacctgctacttgtccactaccagcctggggggactgcccaaggctttgggcctgcagagcccagccccacctcatcttatcccactaggcttatagtgagcaacttctctcaggccaagcagaagagccatctggtggaccccgagatcctccgggaccagtctcgccttgccccagagatcataacagctacccagtataaaaagtgtgatgagttccagacaggcatcctcatctatgagatgctgcacctacccaacccctttgatgagaacccagagctgaaggagagggaatacacacgagcagacctgcctcgcatcccattccgctccccctactcccggggtctgcagcagctggccagctgcctcctgaatcccaacccttctgagcggatcctcatttcagacgccaaaggcatcctccagtgtctgctctggggcccccgcgaagatctcttccagactttcaccgcctgccctagcctagtacagaggaacaccctgctccaaaactggctagacatcaagcgaacactgctcatgatcaagtttgctgagaagtccctggacagggaaggtggaatcagccttgaggactggctttgtgctcagtatttggcttttgccactacagactccctcagttgtattgtgaaaattctgcagcaccgttaatgtgtacctggatgatgcttttactacatcttcaccttcttcatgtcacccatgcacttcccctccctagtgctcactccaaattcaaggaaagaagaaaggcaaacctctaaaaaaaaaa

SEQ ID NO: 777 - DNA, 2742 bp, Homo sapiens
  CDS (103)..(2607)
aaggatccttaattaaattaatcccccccccccgagtgcccgcccgcgccgccaggctcgcaagcaccgcgtaggccagctggccggatcccgccgtctgtcatggcggcccccatcctgaaagatgtagtggcctatgttgaagtgtggtcatccaatggaacagaaaattattcaaagacatttacaacacagcttgtggatatgggggcaaaggtttcaaaaacttttaacaaacaagtaactcacgttatcttcaaagatggctaccagagcacttgggacaaagctcagaagagaggcgtaaagctcgtttcggtgctctgggttgaaaaatgcaggacagctggagcacacattgatgaatcattgttccctgcagctaatatgaatgaacacttatcaagcctaattaaaaaaaaacgtaaatgtatgcagcccaaagattttaattttaaaacaccagaaaatgataagagatttcagaagaaatttgagaaaatggctaaagagctacaaaggcaaaaaacaaatctagatgatgatgtacctattctcttatttgaatctaatggttcattaatatatactcccacaattgaaattaatagtagtcaccacagcgcaatggagaagagattacaagagatgaaggagaaaagggaaaatctttcccccacctcttcccaaatgattcagcagtctcatgataatccaagtaactctctgtgtgaagcacctttgaacatttcacgtgatactttgtgttcagatgaatactttgctggtggcttacactcatcttttgatgatctttgtggaaactcaggatgtggaaatcaggaaaggaagttggaaggatccattaatgacattaaaagtgatgtgtgtatttcttcacttgtattgaaagcaaataatattcattcatcaccatctttcactcacctcgataaatcaagtcctcagaaatttctgagtaatctttcaaaggaagaaataaacttgcaaagaaatattgcaggtaaagtagtcacccctcaccaaaagcaggctgcaggtatgtctcaggagacgtttgaagagaagtatcgtttgtctcctaccttatcttcaacaaaaggccaccttttgatacattcaagacccaggagttcctcagtaaagagaaaaagagtatcacatggctcccattcacctccgaaggaaaaatgcaagagaaagaggagcaccaggagatctatcatgccgaggctgcagctgtgcaggtcggaaggcaggctgcagcacgtggcgggacctgccctggaggctcttagctgtggggagtcttcatatgatgactatttttcacctgataatcttaaggaaaggtattcagagaatcttcctcctgaatctcagctgccatcaagccctgctcagttgagctgcagaagtctttctaagaaggagagaacaagcatatttgaaatgtctgatttttcctgcgttggcaaaaaaaccagaacagttgacattaccaatttcacagcaaaaaccatctccagtcctcggaaaactggaaatggtgaaggccgtgcaacttcgagttgcgtgacttctgcccctgaagaagccctaaggtgttgtagacaggctgggaaagaagacgcatgcccagagggaaatggcttttcttacaccattgaggaccctgctcttccaaaaggacatgatgatgatttaactcctttggaaggaagccttgaagaaatgaaagaagcggttggtctgaaaagcacacagaacaaaggtaccacttccaaaatatcaaactcctctgaaggcgaagcccagagtgaacatgagccatgttttatagttgactgtaacatggagacgtctacagaagagaaggaaaacttacccggaggatacagtggaagtgttaaaaatagaccaacaaggcatgatgttttagatgactcatgtgacggctttaaggacctcatcaaacctcatgaggaattgaagaaaagtgggagaggcaaaaagccaacaagaacattagtcatgacaagcatgccatctgaaaagcagaatgtcgtcatccaggttgtggataaattgaaaggcttttcaattgcaccagacgtctgtgagaacacgactcacgtgctttccgggaagccacttcgcaccctgaatgtgctgctgggaattgcgcgtggctgctgggttctctcttatgattgggtgctatggtctttagaattgggtcactggatttctgaggagccgttcgaactgtctcaccacttccctgcagctcccctgtgccgaagtgagtgccacttgtctgcagggccgtaccgcggaaccctctttgccgaccagccagtgatgtttgtctcgcctgccagcagccccccagtggccaagctctgtgaactagtccacctgtgcggaggccgggtcagccaagtcccccgccaggccagcatcgtcatcgggccctacagcggaaagaagaaagcaacagtcaagtatctgtctgagaaatgggtcttagattccatcacccagcacaaggtctgtgcctctgaaaactacctattgtcacaatgacagtgacctcactggcctgtggtgactgcacacagctcgcaaaactgtctttggatgttcaaatgagaaacaaaactgtgaagagaaggaactggcgtatacaagatgacttctgatatcaaaaaaaaaaaa

SEQ ID NO: 778 - DNA, 3829 bp, Homo sapiens
  CDS (2709)..(3167)
ctgaaaggccataggcaccattattgattactctctggcacccaggtttccttagtttcggttgaagtggtggattggacgatacatttaccagaaacagaaggctgtttcgattatcgactcataagggatttggctcagcccaagatcgcacagcgagtcagggcactcgccctcacatgcgcagcgcggtacacctgccgagggtgcacggcaacgcatgaggcattagccggctgcgaacccgggctcagggtctgggcagcttggcacaggtttcagaccagggaccgacacgcagccaggggtgggaaagctgcctcagccaagctgagcctctcaactggtgtggggaaatcctgtctttccaaaagtccaaggagcgcgggtcggaggagacaaactctttggaaataaccctttcaagactttcttttctgccgttaaatgtgtgtatttattttggtcatttttacgagaagcactttattccctctccctctcactgatcacaaatggaatcacctccctgggcagcgagacgcagttgctctgggaagatgccacagtgaccagggccatggccggtccctctggggagatgggacacggctcctggcagcacccaggagccccccaggctgcctgcctgcgtgcagaggcaggagaggaccgtggagcgtttccgggactgcattttagacggagtgaaatgtacatgaatttggcttttgctagagtctgtgtatggttttttaaggtcctttttccctttctgtttgtaaggtaagagcttctgttcgtgtgcagggaaagcagctcacagacgccgttaaaaccagcttcatctttccttcaggatcatccttttgtacttgatgctggaagctcttggagaaaaagcttaaacatttcaccagaaatcttaattgagcagcagtcatatcgccacagctttgtgagtacacagctaacagatgcgtcgagacctgagatgtgctcgtttttattcctcctctcccagattggctccagcagaaaagtccctcgtgcacaggcagctcttgtgccggcactacttgaaaacatggctactttctaagctacaaaccattagaaaataactcaaaaagatggcagaggcaaatccacagaaggggggctgccctccacacacacacgcccgtcacccacaccttgagcacacaccatgaagatcaccagcttggatggccgtcacctcagacatcactccagggagcacccgcaggagctgggccccctcacgcctgccttcctgggccagcttcctgcttgcagtcactcgcatagcacagaggtggggcttcgggcagggagcggagattcctcataggtgagtccaaatgacctccagcctctcgaaggcatcaagacaaattgaaagaaagcaataactcaccaaagctcaacgctgcccctgcctcgacctccatgggtctcttcgtgttcctcgtttcaccccagaaagtggaggtttcctcttggcattttcggaggaaacttgtaggacacccaaggcgactaagagacagcctccttggcaagggcaggcaccactttgtagcaacttgggcaccagcttttctggacagcctggcttcttactggcattgtccaactcatcccttctcgaagcatgtctttgccatgggctgtgtccttccagggaaattgtggtctcgggcctgggtgagacaatgaagtgacttccaaccgacagttgctagaattcacagggcagaaaaggggttgaccttctccccttctggctttccacccggcctgctgcttgctgtcgccactcatgtctcctccacatgcggtccacacatcagtaagggcctggagatgtgtaaagacacagcaaggggcaagcagactcttggccacgtgtttccagtggctggaccacgccgacacctgggatcttgagatacccaggaagggaggctgtctggccagcctctccctgcctccacttgctccacgtccagctcatcctcaccttccctcttttttaaagtcacatttccatgtttcaacattagtttgcattcacctttacaaaggcctttctttagatctgtgcagcctttgcgtgccaaacttgtgaaattccttttaccttttttggagtacttgctataaagccacctgtcaacaaacccccattacgtacagaataggacctatccagtagccaggccagtaggcagttggggaaggtgggaaggatccagcgaggcccctgagcctgcacctggacaggtgtacgtctgcacccatcaccctcagcaccaggccaccctgcagtccacttactgtactgtgttgtggaaggatatgctaagtgatgaaagttgcgagcagtctcactggtcgtgtaaacttttttttttttggaaattgaagctgtagagtgctgcccgaaatctctaggaagttggtggcaagggacagcactcacactcttctggtcatgatctctgatctccacctcaaatgacaataaaaaactggtccaacgaagacactgctcagcacttcagccatcaggactaatccatcgatgactggaaaagaggctagctttgaggaaaacagcctgggctcttgggagcagagtccagtgggtgtgaggctgacttgccgacggtcggcaggtaatggctctcagccggcgaggcggtcccacagctctcctcccagggcagcctgaggaggaggaggccgggtgcctgtttggtggcagcttcagcctagggatacctgaagctgttgagcaacacctttatgaaatgttgccagagcagcaacacttccctgtgggcacagccccgggaaatccggtaccaagtgagcaaggtggcaggacccacccaagcctgatacgcatctgggcctgccgggctcagcaggggaggctgctacggctgcccacttcccagcaccgtctgtcaggcttgaacccctctgtgctgttcccttcctggctaatagggagacccttcgcaggcacccactgtttcaacttgaccctcccaccccctgctactctcctccacacacccctccgttccgctagcctaccctgtcagcctttcaataaaagttatgcacaaatgtgaacacctgagatggagctgaacatttcttcactttgttctttttctgaagtcaaactcttatcaaatgccctaaaattattaccacctaagagaaacaggaaaaaggttacatgtttttgtttactgagagtaagatcacctgcatctggaagacgggctggtaaattggtttggctacagaacagaaagaaaacaaaaacaaacctcgtaagggaagtatcgcactcagacaccaccacttcctagagccaaatgagcaatcccaaactgcaagtgccgtaagtgggcctgtgacgtcacaccgcccggcccgaggtatcgcatgtgcgggggaggcccacactacagctgtcctctcgtctagaaggcaccacctcgctttcatgtcccgtgtgttttggaaaagcagtatggtgtgtcatgtctagcggcgaacacttccctccctctgtccttgaggttgtaatataaaaactgtgtttctgtacgtgtgggtgggaattctctgacggtgctcgttcatagcacaagcttacgctgagttctgaactgtcgttcacagctgcgtgtctgcatggtgtcgcatctgttgtacctttggggaaaatttgtatgtaaatgtacagaaataaaaacgttgccccattaaaaaaaaaaaa

SEQ ID NO: 779 - DNA, 1426 bp, Homo sapiens
  CDS (184)..(1248)
tttaggggtggagccggcaggaaatttaaactgaagccgcggccgaaaacgccaagagattgatgctgtagctgccctgagataaccaggactgtggaatcgggaagagctcatggagctcgcgaatgtaatacggaggcctctgaggaaggagtacggaggccgagaaggagccggcatttgatgagcgaaccgggaaagggagacgattgcctcgagctggagagttccatggctgagagtaggctccgggccccggacctaggagtttccaggtgtctaggaaaatgccagaagaactcaccaggtgccaggaagcatcccttttccggaaagtccttttacttggatctgcctgctggcaagaatctccagtttttgacgggggccattcagcaactgggtggggtaattgagggttttctgagcaaagaagtaagttacatcgtgtccagccgcagagaagtaaaggcagagagcagtgggaaaagccatagaggctgccctagccctagccccagtgaggtcagagtggaaacatcggccatggttgatccaaaaggcagccaccccaggccttcacggaaacccgttgactcggtgcctctaagcagagggaaggagctgctgcagaaggctatcagaaaccaggggagcatcagtggaggaggcagtgggggcagcagcagcctcctgaccaatgcccgctcttggggagtgaggattctgcacgtggatgaaatgatgatgcacgtgcaacagctgtctcttgcgtctttatgtgtgaaaaaacaacagccaaagaagccagagggaacatgtccagcagcagagtcaagaacacggaaagtggccagactgaaggccccgttcctcaaaatcgaagatgaaagcaggaagtttcgtcctttccatcatcagtttaaatcctttcctgaaatttcttttcttggacccaaagatgcaagtccctttgaggccccgacgaccctgggcagcatgcaccataccagagaatccaaggatggagagccaagcccacgatcagctgcccacaccatgcccaggaggaagaaaggctactgcgagtgctgtcaggaggccttcgaggagctccatgtgcatcttcagagtgcccagcaccggagctttgccctggaagcccatctatatgcagaagtggacaggatcattgctcagctcagccacagctttgcagacatccctttccaggctggcctccccaggtgagtgccacgctggcaggcacaactgtgtctgctctctcctctgttgccctctgggtgggaagagaccctcaggttggtggctgctgggaccagactgtgatgttttcctcttttctcaccttcctttccccttatcctcagtcctgtttgttttggggctggccaaaaaaaaaaaa

SEQ ID NO: 780 - DNA, 3310 bp, Homo sapiens
  CDS (55)..(3036)
tgcgcgggcggaggagtgtgacgggccttagggccgctgtggatggtttctaaaatgatcattgaaaacttcgaggcactcaagtcctggctcagcaagactcttgagcccatctgtgatgcagatccatccgccctagcaaaatatgttctggctttggtaaagaaagacaaaagtgaaaaagagttaaaggcattatgtattgatcagctggatgtatttcttcagaaagagacacagatatttgtggaaaaactttttgatgctgtgaatacaaagagttacctacctcctccagagcagccatcatcaggaagcctgaaggtagaattttttccacaccaagaaaaagatataaagaaggaagagatcactaaggaggaagagcgagagaagaagttttctagaaggctaaatcacagtcctccccagtcaagctcccgatacagggaaaatagaagccgtgatgagaggaaaaaagatgatcgttctcgcaaaagagattatgatcgaaaccctcctcgaagagattcatacagagaccggtacaatagaagacgagggcggagtcgcagttatagcaggagtcgaagtcgaagttggagtaaagagaggcttcgtgagagggacagagatagaagcaggactagaagcagaagcagaacacgaagcagggaaagggatctggtaaaacctaaatatgacctggatagaacagatccattagaaaataattatactccagtctcttcggtacctagtatttcatctggccactaccctgtacctactttgagcagcactattacagtaattgctcctactcatcatggaaacaacactaccgaaagttggtctgaatttcatgaagaccaagtggaccataactcttacgtaagaccacccatgccaaagaaacggtgtagagactatgatgaaaagggtttttgtatgagaggagacatgtgtccttttgatcatggaagtgatccagtagttgtagaagatgtgaatcttcctggtatgctgcctttcccagcacagcctcctgttgttgaaggaccacctcctcctggactccccccacctccaccaattcttacacccccacctgtgaatctcaggcccccagtgccaccgccaggtccattgccacccagtctcccacctgttacagatgatatttcttattctttggttttgacaggaccaccacctccacttcctcctttgcagccatctggcatggatgctcctccaaactctgcaaccagttctgttcctactgtagtaacaactggcattcatcaccagcctcctcctgctccaccctctctttttactgcagtttttgtattaccagatacatatgacacagatggctacaatcctgaagccccaagcataacaaacacttccagacctatgtatagacacagagtgcatgcacaaaggcccaacttgataggactaacatcaggggatatggatttgccacccagagaaaagcctcccaataaaagcagtatgaggatagtagtggactcagaatcaaggaaaagaaccattggttctggagagcctggagttcctacaaagaagacttggtttgataaaccaaattttaatagaacaaacagcccaggctttcagaagaaggttcaatttggaaatgaaaataccaagcttgaacttagaaaagttcctccagaattaaataatatcagcaaacttaatgaacattttagtcgatttggaaccttggttaacttacaggttgcttataatggtgatcctgaaggtgccctaatccaatttgcaacatacgaagaagcaaagaaagcaatatcaagtacggaagcagtattaaacaatcgctttattaaggtttattggcacagagaaggaagcacccaacagttacaaactacttctccaaaggtaatgcagcctttagtccagcagcccattttgcctgttgtgaagcagtcagtcaaagagcggctgggtccagtaccttcaagtactattgaacctgcagaagcccagagtgcctcttcagaccttcctcaggtgttgtctacatctactggcctaacaaaaacagtgtataatccagctgctttgaaggctgcacagaaaaccttacttgtttccacctctgcagttgataataatgaagcacagaaaaaaaaacaggaggcattgaaacttcagcaggatgtaaggaaaaggaaacaagaaattttagaaaagcacattgaaacacagaagatgttaatttcaaaactggagaaaaacaaaacaatgaagtctgaagataaagcagaaataatgaaaactttagaggttttgacaaaaaatattaccaagttgaaagatgaggtcaaagctgcttctcctggacgctgtcttccaaaaagtataaaaaccaagactcagatgcagaaggaattacttgacacagaactggatttatataagaagatgcaggctggagaagaagtcactgaacttaggagaaagtatacagaattacagctggaagctgccaaacgagggattctttcatctggtcggggcagaggaattcattcaagaggtcgaggtgcagttcatggccgaggcagggggcgagggcgagggcgaggtgtgcctggtcatgctgtggtggatcaccgtcccagggcattggagatttctgcatttacggagagcgatagagaagatcttcttcctcattttgcgcaatatggtgaaattgaagattgtcagattgatgattcctcacttcatgcagtaattacattcaagacaagagcagaagctgaagcagctgcagttcatggagctcgtttcaaagggcaagatctaaaactggcatggaataaaccagtaactaatatttcagctgttgaaacagaagaagttgagcctgatgaagaagaatttcaggaagagtctttggtggatgactcattacttcaagatgatgatgaagaagaagaggacaatgaatctcgttcttggagaagatgatttgactgatcattgatctgcatatgctagaactctacctgtgtttcattagtattatctaatgtacttttacatatttgtaaaaacaatttttggtaaaatgtgatgaagatggatttcacaaatagacaaaaaagaagaaaactaccttctgatcttgtattttgaaagattgatgtttgcattttacttcagtaaacaattgctaaagacatcacactagaaacatatgtattgcattaatcagggcataactaatattctcctgttc

SEQ ID NO: 781 - DNA, 721 bp, Homo sapiens
  CDS (57)..(383)
tttcgtcagagacgctgcaaattgcttgtggacggtgtaggccgctgcaggccaccatgaaccggcttccggatgactacgacccctacgcggttgaagagcctagcgacgaggagccggctttgagcaggtgggctcccgccccaccctggcccccgaggatttgggtcgaggcctggctttggtcgcctccattcgttgcgcctgccgagcctacgcagaccctagcggctcgggagcctgtcgtgcctgttacttgtgcgaagccaaagggctttcctgatggggtcgcgcagtcccggggggaggcggtgccgatgtcgcctgtaggaagagggatattccggaatcacgggggaccgcgtgtaaatcttcaaaagcaatgagatcgaaacctgtctctacaccttagtagcagagtgacggaagctctgaggatgaagtggatgtgcttttacatggaactcctgaccaaaaacgaaaactcatcagagaatgtcttaccggagaaagtgaatcatctagtgaagatgaatttgaaaaggagatggaagctgaattaaattctaccatgaaaacaatggaggacaagttatcctctctgggaactggatcttcctcaggagatggaaagttgcacagctccgacaggtactacgatgatatatattttgatctgattccgagataagacgagcactcagttgacagaaaaaaagaa

SEQ ID NO: 782 - DNA, 1748 bp, Homo sapiens
  CDS (13)..(1365)
cgcactctcgggatggagggcgagcgccgggcatcgcaggcgccctcctcgggcctcccggccgggggcgccaacggggagagcccggggggcggcgccccctttccgggcagcagcggctcttccgccctgctgcaggcggaggtgctggatctggacgaggacgaggacgacctggaggtgttcagcaaggatgcctcattgatggacatgaactccttcagccctatgatgccaacatcccctttatcaatgataaaccaaatcaagtttgaggatgaaccagatttaaaggatctcttcatcacagttgatgaacctgaaagtcatgttactacaatagaaactttcattacgtataggattattactaagacatctcgtggggaatttgactccagtgaatttgaagttaggagacgatatcaagatttcctttggttgaagggaaaactggaagaagcacaccccactctgattattccaccattgccagaaaagtttatagtaaaaggaatggtggaacgctttaacgatgacttcattgagacacgcaggaaggctttacataaatttttgaaccgaattgctgatcatccaactttaacatttaatgaagacttcaaaatttttctcactgcacaagcttgggaactctcttctcacaagaagcaaggtcctggcttgctaagcaggatggggcaaaccgtcagagctgttgcgtcctcaatgagaggagttaaaaaccgcccagaggagttcatggaaatgaataactttattgaactatttagccagaaaataaatttgatagataaaatatctcagagaatttataaggaagaaagggaatattttgatgaaatgaaagaatatggcccaattcatattctgtggtcagcgtcagaagaggatctggttgatactctaaaggatgttgccagctgcattgacagatgctgtaaggccactgaaaagcggatgtctggactctcagaggccctgcttcctgttgtacatgagtacgtgctttatagtgaaatgttaatgggtgttatgaaaagaagagaccaaatacaagcagaactggattccaaagttgaagttttgacctataaaaaggcagatactgatctgcttccagaggagattggaaaacttgaagataaagtggaatgtgctaataatgccctgaaagcagattgggagagatggaaacaaaatatgcaaaatgatatcaagttagcatttacagatatggctgaggagaatatccattattatgaacagtgccttgctacgtgggaatcattccttacatcacagaccaaccttcacttggaagaagcctctgaagataaaccttaatcccattgaggacttctgtttgatctttgggagacagcatttattaaccaaagttattctttctggatctgccgtgtccttataaagtggatgaaaaatgttttgtacccatctggaaaaccaacaacttgaaatctcaggtattccaggtcactgacatgaatttgaagatatatctatctgtatggatatatatctatatgtatatagatatataaatacagagagatatctggcttggttttaattatgttcttaaatttgtgtgccaataattgcatatagattttttttcttaaatatttgactgtggaacatgccattttaaatatgttgtaaggactgttttaataaaaagtttagtatgaaaaaaaaaaaaa

SEQ ID NO: 783 - DNA, 1094 bp, Homo sapiens
  CDS (270)..(788)
attgggttccggggagggtcacagaggtcagtgagtgggtggggggagccccctggatgcctgcttcagcgaattccatttgaggcctctgccaccgctgcatttctgcctgctggaagctgctgggtagtgggaccattgtgtagggaggcttaagggatttggggaacctaagggggcaaagaggccagtgaccaggctcagctcagtctgcacagaggggccgtggcagaaggagggctcgggcaggctctgccactcagatcaccatgtacagcttcatgggtggtggcctgttctgtgcctgggtggggaccatcctcctggtggtggccatggcaacagaccactggatgcagtaccggctgtcagggtccttcgcccaccagggcctgtggcggtactgcctgggcaacaagtgctacctgcagacagacagcatcgcatactggaatgccacccgggccttcatgatcctgtctgccctatgcgccatctccggcatcatcatgggcatcatggccttcgctcatcagcctaccttctcccgcatctcccggcccttctctgctggcatcatgtttttttcctcaacccttttcgtcgtgttggccttggccatctacactggagtcaccgtcagcttcctgggccgccgctttggggactggcgcttttcctggtcctacatcctgggctgggtggcagtgctcatgacgttcttcgcagggattttctacatgtgcgcctaccgggtgcatgaatgccggcgcctgtctacaccccgctgagcccaaatgtgtcccccaacttcatctggaagttaaagtgaggccactgaagaggaggaggagggtctagaggcctgaaatcctggttcctaggggaatgagggggctcagttctggactgtgggtttgtggggggaggctgactcctggtcctaggctggaaggaggaagaatagggcccatgggagggagctgataagactcaagtccccgtctgcctggcaggttgttagaaaaatggactatccattagagcaactttctggggcctaataaaattgatgtgaaactaaaaaaaaaaaa

SEQ ID NO: 784 - DNA, 2634 bp, Homo sapiens
  CDS (66)..(2438)
aggccacaaaagaagctaaggagagcaagaagccagagagcaggaggtcatctttgctgtctctgatgacggggaagaaggatgtggctaagggcagtgaaggtgaaaaccttctcacggtcccagggagggagaaggaaggcatgctgatgggggttaagccgggggaggacgcatcggggcctgctgaagaccttgtgagaagatctgagaaagatactgcagctgttgtctccagacagggcagctccctgaacctctttgaagatgtgcagatcacagaaccagaagctgagccagagtccaagtctgaaccgagacctccaatttcctctccgagggctccccagaccagagctgtcaagccccgctctggccaggcatctgtcccctctgaattgggacatggtgcagacacacagtcctctgagagtccttctgtcttctcctctctctcatctcccatagcagctcccatttccacatccactccaattgaaagctggcctctcgtagacaggggccaggccaagtctgaaggaccacccttgctccctaaggcagagttgcaaactgagagtttaacaccggttccaaattctggttcttctgtcctgggatcacttttcaaacagccatcctttccagcaaataaagggacagaagattctctgatgggcaggacccgtgagacaggcacagagaagaacaccagcagccttgagttggaggagtctctcccagagcagcctgaaacagggcgacaagaggaagaacttccgagattcccctgcaaaaaacaagactacagcccatcatctggagaagcccaggaagtaccgtttgccctttcactcagcagtgatggagctgtgagccctgttggggagcttgcagcaggaggagacagagacttggagagtcaggctgggtctcttgtggagagcaaagccagggatgcagctgaagaagtggcgccccctcttcccatgggagcatcagtcccttccattgattccatgatgcggaagctggaagagatgggtctgaacctccgcaaggaccagaagaaaaccaagaagcgtgtgtcattttctgagcagctcttcacggaagaggcagtggcgggggctgccttgctggtggaaggacacagcagttgtccccaggagctgaaccctgcatggtctgttgctggaaacgcgtctgacggagagcctcctgagtctccccacgcagaggactcagaaagggaatcggaggagagtttctccgaagtccccatgagtgaagcaagctcagcgaaagacactccactctttaggatggagggagaggatgcccttgtgactcagtatcagagcaaagccagtgaccacgaaggtttattgtctgaccccttgagtgaccttcagttggtctcagattttaaatctccaatcatggccgatctgaacttaagccttccttccattcctgaagtcgcatcggatgatgaaagaatagatcaggttgaagatgacggagatcaggttgaagatgatggagagacagcaaagtcgtcaactctggacataggagctttgtccttgggcttggtagtcccctgtcctgagaggggaaaggggcccagtggcgaggcagataggttggtactgggggagggcctgtgtgatttcaggctgcaagcaccccaggcatctgtgacagctccttcagagcagaccacagagttcggaattcacaaaccacatcttggcaagagctcaagcttggataaacagctgccaggccccagtggtggtgaggaagaaaaaccgatgggaaatgggagtccaagcccgcctcctggcacatccctggacaatcctgtacccagcccctccccttctgagatctttcctgtcacacactctttccccagctctgcacattctgacactcaccacaccagcacagcagaatctcaaaaaaaagccacagcagagggctccgctggtagagttgaaaattttggcaagaggaagccactcctccaggcctgggtctcaccctcggagacacatccagtctcagctcagccaggcgctggaactgggtcagccaagcacagacttcatcctgtgaagccaatgaatgcaatggccaccaaggttgctaactgcagcttgggaactgccaccatcatcagtgagaacttgaacaatgaggtcatgatgaagaaatacagcccctcggaccctgcatttgcatatgcgcagctgacccacgatgagctgattcagctggtcctcaaacagaaggaaacgataagcaagaaggagttccaggtccgcgagctggaagactacattgacaacctgcttgtcagggtcatggaagaaacccccaatatcctccgcatcccgactcaggttggcaaaaaagcaggaaagatgtaaatcagcagaaaaaaaacaccgagacgtttctgtgacttcactttcacctgctccaggggtcaaggacttgccttgcggtgataaccagccagcaggctccgaatcaccatctccctcacatgttatccggcaagagtgaattataccaatggaagccaggttaatgattacaattaatctttactgtacattc

SEQ ID NO: 785 - DNA, 2380 bp, Homo sapiens
  CDS (359)..(1618)
tttcgtggagaggggctgttgatatcaatatggcggttgtcagccagacaaagacagtcagtctgatgtgattgagacaagggaggtttttcagggggagactgggagataggggcctcccctcccccttctcctcttcctgcgccggcctcaacccctccccagtcccctcccgacgggcgccccacgcggaagacacccctccccctcccgccttccctcctccctatctcagcccttcgtactgggacgttggggagggggctgtgccgggcggagagaactcagcgaggattctgagaatggtagataacgcagatcatctctggaaaggatattgatccgcctcatgtaaagtatgcttagttcctttccagtggttttgctggaaaccatgtctcattatacagatgaacccagatttaccatagagcagatagatctgcttcagcgacttcggcgtactggaatgactaaacatgaaattctccatgccttggaaactttggaccgtcttgatcaagagcatagtgacaagtttggaagaaggtccagctatggaggaagttcatatgggaatagtactaacaatgtcccagcatcttcctctacagctacagcttccacacagacgcagcattcgggaatgtccccgtcacctagcaacagttatgatacttccccacagccttgcactaccaatcaaaatgggagggagaataatgagcgattatctacatccaatggaaagatgttaccaactcgctaccatgcaaacagcatgggtcagaggtcatacagttttgaagcctcagaagaggacctagatgtagatgataaagtggaagaattaatgaggagggacagcagtgtgataaaagaggaaatcaaagcctttcttgccaatcggaggatttcccaagcagttgttgcacaggtaacaggtatcagtcagagccggatctctcattggctgttgcagcagggatcagacctgagtgaacagaagaaaagagcattttaccgatggtatcaacttgagaagacaaaccctggcgctacactaagtatgagaccagcccccattccaatagaggaccctgaatggagacaaacgcctcccccagtctctgccacatctggtactttccgactgcgacgagggagtcgatttacctggagaaaggagtgcctggctgttatggaaagttacttcaatgagaatcaatacccagatgaagcaaagagggaagaaattgcaaacgcttgcaatgcagttatacagaagccaggcaaaaagctgtcagatctggaaagagttacctccctgaaagtatataattggtttgctaacagaaggaaggagatcaagaggagagccaatattgaagcagcaatcctggagagtcatgggatagatgtgcagagtccaggaggccactcaaacagtgatgatgtcgacgggaatgactactctgagcaggatgacagtacgagccatagtgaccaccaagaccccatctcattagctgtggaaatggcagcagtcaaccacactatcttggcattggcccgacaaggagccaacgaaatcaagacagaggccctggatgatgactgatcagggaggttaaacatgacaagttaacttagtttagacgtagcaccttagcagactttcctcggtccttaacatgtgttcttacagtataacttgcagtttcttgtatgtcaggtagctgttagggtcttgttctgtgaagatggcatggtgccctcagcctttgcatatactctctcagtattaactcccagtaaataataaccaaccaaccaaccaaccaaacttccctctcccagcccccgaggctagaaaatcttgctgctccgtcttagcattccaagaaagtgcttccaggtatttagatagccctcagttctcaaatattagactacgtgtaaaatcttgggtacctttagattcttgtaacactagtctgtactcccttttccttccccaagactgataggatgcaagctgaggtcgtggcacaggaatgacagacaccatttggggagtatccacagagtcaaaggaacactagaatccccacctcagcgtgaggataattgatttccagctgcaataagccgtgcctcattatagccacactgtggctagattatacttctttgggtgctgtgctaagaatgtcaatggaaaaagccgatctcagattttgtttgaagttaacatgcctgacacagacatcctttcctctcacaagctgtgtgacttagtagataaaatactgccttctgcctttgggaccatgattaaaaacaaagacaaaaaccaaaagtcattaaaaaaaaaaaa

SEQ ID NO: 786 - DNA, 2452 bp, Homo sapiens
  CDS (359)..(1690)
tttcgtggagaggggctgttgatatcaatatggcggttgtcagccagacaaagacagtcagtctgatgtgattgagacaagggaggtttttcagggggagactgggagataggggcctcccctcccccttctcctcttcctgcgccggcctcaacccctccccagtcccctcccgacgggcgccccacgcggaagacacccctccccctcccgccttccctcctccctatctcagcccttcgtactgggacgttggggagggggctgtgccgggcggagagaactcagcgaggattctgagaatggtagataacgcagatcatctctggaaaggatattgatccgcctcatgtaaagtatgcttagttcctttccagtggttttgctggaaaccatgtctcattatacagatgaacccagatttaccatagagcagatagatctgcttcagcgacttcggcgtactggaatgactaaacatgaaattctccatgccttggaaactttggaccgtcttgatcaagagcatagtgacaagtttggaagaaggtccagctatggaggaagttcatatgggaatagtactaacaatgtcccagcatcttcctctacagctacagcttccacacagacgcagcattcgggaatgtccccgtcacctagcaacagttatgatacttccccacagccttgcactaccaatcaaaatgggagggagaataatgagcgattatctacatccaatggaaagatgttaccaactcgctaccatgcaaacagcatgggtcagaggtcatacagttttgaagcctcagaagaggacctagatgtagatgataaagtggaagaattaatgaggagggacagcagtgtgataaaagaggaaatcaaagcctttcttgccaatcggaggatttcccaagcagttgttgcacaggtaacaggtatcagtcagagccggatctctcattggctgttgcagcagggatcagacctgagtgaacagaagaaaagagcattttaccgatggtatcaacttgagaagacaaaccctggcgctacactaagtatgagaccagcccccattccaatagaggaccctgaatggagacaaacgcctcccccagtctctgccacatctggtactttccgactgcgacgagggagtcgatttacctggagaaaggagtgcctggctgttatggaaagttacttcaatgagaatcaatacccagatgaagcaaagagggaagaaattgcaaacgcttgcaatgcagttatacagaagccaggcaaaaagctgtcagatctggaaagagttacctccctgaaagtatataattggtttgctaacagaaggaaggagatcaagaggagagccaatattgaagcagcaatcctggagagtcatgggatagatgtgcagagtccaggaggccactcaaacagtgatgatgtcgacgggaatgactactctgagcaggatacttggcaagtacgcaatggggaggaggaggagggaagaagttcagagggaggcagagaagcagagaaggatgacagtacgagccatagtgaccaccaagaccccatctcattagctgtggaaatggcagcagtcaaccacactatcttggcattggcccgacaaggagccaacgaaatcaagacagaggccctggatgatgactgatcagggaggttaaacatgacaagttaacttagtttagacgtagcaccttagcagactttcctcggtccttaacatgtgttcttacagtataacttgcagtttcttgtatgtcaggtagctgttagggtcttgttctgtgaagatggcatggtgccctcagcctttgcatatactctctcagtattaactcccagtaaataataaccaaccaaccaaccaaccaaacttccctctcccagcccccgaggctagaaaatcttgctgctccgtcttagcattccaagaaagtgcttccaggtatttagatagccctcagttctcaaatattagactacgtgtaaaatcttgggtacctttagattcttgtaacactagtctgtactcccttttccttccccaagactgataggatgcaagctgaggtcgtggcacaggaatgacagacaccatttggggagtatccacagagtcaaaggaacactagaatccccacctcagcgtgaggataattgatttccagctgcaataagccgtgcctcattatagccacactgtggctagattatacttctttgggtgctgtgctaagaatgtcaatggaaaaagccgatctcagattttgtttgaagttaacatgcctgacacagacatcctttcctctcacaagctgtgtgacttagtagataaaatactgccttctgcctttgggaccatgattaaaaacaaagacaaaaaccaaaagtcattaaaaaaaaaaaa

SEQ ID NO: 787 - DNA, 531 bp, Homo sapiens
  CDS (40)..(528)
gatttccaaacctaaagttggggggtgatctctgaggagatggatcggtacctgctgctggtgatctggggggaaggaaaattcccgtcggcggccagtagggaggcagaacatgggccagaggtgtcgtcgggtgagggtactgagaatcagccggacttcacagcagcaaatgtttatcacctcttgaaaagaagcattagtgcttcaattaatccagaagatagtactttccctgcctgttcagtgggaggtatacctggttccaagaagtggttctttgcagtgcaggcaatatatggattttatcagttttgtagttctgattggcaagagatacattttgatacagaaaaagataaaattgaagatgttcttcaaacgaatatcgaagaatgtttgggtgctgttgagtgttttgaagaagaagacagtaatagcagggaatcattatccttggctgagtatgcttatatggtttttgtattatcattaaaatacttaatattagacagttattttaatccatga

SEQ ID NO: 788 - DNA, 1598 bp, Homo sapiens
  CDS (55)..(1461)
cacaacaaaacgtccccacatgggcttgacttcgaagtcctcgaatgtcatctcatggaagccccactggggagcatcctcagcccctgcccagggagggcagccacggggagggcgggcacggggagggtgggcacggggctgcggccacccgctgtgttgcaactctgccctctgcttgctttttatcgctgtgtccggaagatgaggagcgggaaggcctcctgcaccctggagaccgtgtgggaagacaagcacaagtatgaggaggccgagcggcgcttctacgaacacgaggccacacaggcggccgcctccgcccagcagctgccagccgaggggccagccatgaatgggcccggccaggacgaccctgaggacgctgatgaggcggaagcccctgacggcggcagcaggcgtgatcccaggaagagccaggacagcaggaagcccctgcagaaaaagaggaagcgctcccccaagagcgggctcggccccgcggacctggccctcctgggcctctcggccgaacgtgtgtggctggacaagtcacttttcgaccaggcagagagctcctaccgccagaagctggcagatgtggctgcccaggcagcctggcctcctgccttggccccttggggtctctgcacccatggaaaccaggtggcctgccaccacgtgacctgggggatctgggtcaacaagtcctccttcgaccaggctgagcgggccttcgtggagtggtctcaggccctgttgctggcccccgagggcagccgcaggcaggggactcccaacacaggccagcaggtggccgtccccgacctggcccaccagcccagcccaccggtcaatggccagcccccgctgggcagcctgcaggcactggttcgggaggtgtggctggagaagccccggtatgatgcagccgagaggggcttctacgaggccctgtttgacggccatcccccagggaaggtgcgcctgcaagagcgagccggcctggccgagggtgcccggcggggccgcagagaccggcggggccgcaacatcttagggaacaagcgggccgggctgcgacgggccgatggggaggccccctctgccttgccctactgttacttcctgcagaaggatgcagaggccccctggctcagcaagcctgcctacgacagcgccgagtgccgccaccacgctgccgaggccctgcgtgtggcctggtgcctcgaagctgcctccctgtctcaccgacccggtcctcggtctggcctgtccgtgtccagcctgagacccaacagaaaaatggctacaaacttcctagcacatgagaagatctggttcgacaagttcaaatatgacgacgcagaaaggagattctacgagcagatgaacgggcctgtggcaggtgcctcccgccaggagaacggcgccagcgtgatcctccgtgacattgcgagagcctgagagaactccagaaatcgctggtggaagctcaggcggggctccgggccacggggaccgggggtctctcgggtgcgttggtgggcccctgggggggcgagaggggggcccgggggggggggggatgccggggcaca

SEQ ID NO: 789 - DNA, 2042 bp, Homo sapiens
  CDS (1)..(1863)
atgcatgtcttcattgatgaacatggggaaattagatcctgttatttaaaatctggaaatcagaaagaaggccctttacagcctctaccatcaaataatgactgtctctctcaggctcgagagatgcaggtcagctcctccagtaccacaacttctgagagtcaagatccgtcttctggggaccctgccgtcagtgcccttcagcaacagctgttactgatggtggctcgcaggacccagtcggaaaccccacggcatgtgagtcaggatctggaagcctcgtcatgttcttcaacacaaggaaaatttaaccgagagcagttttacaaatttatcattttccctggcaagtggattaaagtctggtatgatcgactgaccttgctggcattacttgatcgaactgaagacatcaaggagaatgtactggcgattttactcattgtcctggtttccctccttggatttctgaccttgagccaaggcttttgcaaagatatgtgggtgctcctcttctgcctcgtcatggccagctgccagtactccctgctaaagagtgttcagcctgaccccgcctcaccaatacacggacacaaccaaatcataacatatagcagaccaatctatttttgtgtgctgtgtggccttattttgcttcttgatacaggggccaaagccaggcaccctcccagttacgttgtgtatggcctgaagctcttctctccagtgtttctacaatcagctagggactacttaatagtatttttatattgcttccctgctatttccctccttgggctcttcccgcaaatcaacactttctgcacttatcttttggagcaaattgacatgctgttttttggtggttctgctgtgtctgggataacctcggctgtttacagtgtggcccggagcgtcttggctgccgccctgctccacgcagtctgcttcagtgcagtgaaggaaccgtggagcatgcaacacatcccggcactgttttcggccttctgtggcctcttggtcgccctttcttaccatctgagccgtcagagcagtgacccatctgtactcatgtccttcatccaatgcaggctgtttcctaaatttttacatcaaaatctggcagagtcagctgctgaccctctccccaagaagatgaaagattcagtgacggatgtcttaaaatgggatctcatcgtctgcgcagtggttgctgtcctctcatttgcagtcagcgccagcactgtattcctgtcattgcgaccatttctcagcatcgtgctgtttgccttggctggagccgtggggtttgtaacacattacgtgctccctcagctccgcaagcatcatccctggatgtggatttcacaccccattctcaaaaacaaagagtatcatcaacgggaagtgagagatgttgcccatttaatgtggttcgaaagactctatgtttggcttcagtgttttgaaaaatacatcttgtacccagcgctaattttgaatgccctcactattgatgcatttttaataagcaatcaccggagacttggtacccactgggacatttttctgatgatcattgctggcatgaagctgttgcggacatcattctgcaacccggtttaccagtttattaacttgagcttcactgtcatctttttccactttgactacaaagatatttcagagagcttcttactggatttcttcatggtgtccattttatttagcaagctcggggacctgcttcacaagttacagttcgtcctgacatatgtggctccttggcagatggcttggggttcttcgtttcacgtgtttgctcagctctttgccattcctcgaatggaaacatacttaggataatccttgagtgataatatattttatattttgaaaaatgatttcttccaggccctaactttttttaaaaaaatgttaagcatacgaagagtggatctcacaatacacattgttctatgttgctattcttagatgtgcattgatatttctaaagtgtttcaaggtcatttggcagaacc

SEQ ID NO: 790 - DNA, 1778 bp, Homo sapiens
  CDS (279)..(791)
cgcccagatcgcgctccgagtcgacgagggggctcgtgcaggtccggcgcgcgcgtggggagcggcccgggggcgccgagggagccggcggcagcgaggatgccggcacggggacgcggctgcctgctgggggtgtgagcgagaggctgagcgctgcccgctcggcgcatccattccgcaccgccccctccctgcgggcctcggaggaagccccccgcgctgtgcggaggcgcctcggctgccgggctgcggagccccggcccagcaggagggaaaagatgccgttccaccatgtgaccgccggcttgttgtacaaggggaattacctcaaccgatcgctctctgctggcagtgacagcgaacagctggctaatatctccgtggaggagctcgatgaaatccgagaggcctttcgggttctggaccgggatgggaacggcttcatctccaagcaggagctgggcatggccatgcgctctttggggtacatgccaagcgaggtggagctggccatcatcatgcagcgcttggacatggacggggatggccaggtggattttgatgaattcatgaccattcttggccccaaactggtgtcttcagaaggtcgcgatggttttcttgggaacacgatagacagcatattctggcagtttgacatgcaaaggataactctggaagagttgaagcacattctctatcatgccttccgagaccacctaacgatgaaggacattgagaacatcattatcaatgaggaagagagcctgaatgagacctcggggaactgctaaacagagtttgaaggagtgcattcccagaagcagaacagacagacctgcgtccggaagagcctcatatgcgcctttgctatggccttcatcatcagtgccatgctgattgcagccaaccagatactccggagcggcatggagtagcagcctcccgccagccacactgtgttgcagctcaccgcgcatgtgcatgccgtgcgggcagactcttcctccacacagcagacacggacctatggactatggatggatgcggacgatggaaccgttcagtaaagaacccaaggttgagtgcaactggggttgcacttcagcttcatctccttggcagggacactaaagggctgtcttcagtgctttaatggttttgttttctaatgcaataaatcgccaggatttccaaattattgcttcaaccatcagtcataactctagagaaaaacttcatcttcatctcggaattccagcagccatccaggtataatggtgagagagcaagagagaggcatgaacacacagtcacctccactccccattctttcaacccaagggtcaacaggagactctctgctgaggtcaaccctcagttccaagaggctgacttcagggttgccacagaagagggggctttccatcccaccctggcttccttcctccacccagtggagacccccccaaggcatgaggggaaagccattaagtggggtgcagcccctggcggtcttcagctgcacccctcaccgcttccgttcttactgccttttctagaggactgccattggtagagctggggtgctctcagtttccgtcggcacttggctttctgttcctagagcccatcccgcaccagcattttggaacctgcagagagcctttctcccagctttgccgcctgtgctgccattagagaaaaaaagaagcataatcgtgggcatctctataacatagacagatatatatatttggcttcttaaaaaaaaaaaa

SEQ ID NO: 791 - DNA, 974 bp, Homo sapiens
  CDS (69)..(890)
ttaagctggtgtaaatcggccgaggttctgagctcgggtcaccctgccccatctccatctcctatgagatgagtgactcccaagaccccaccacttcccctgtagttaccacccaggtagagctggggggctgcagccggcaaggtgggggcaatgggttcctccgttttcgccagcaccaggaggtccaggccttcctcagccttctggaggacagttttgtccaggaattcctctccaaagacccctgcttccagatttcagataagtatctcctggccatggtgctggtctacttccagcgcgcccacctgaagctcagcgagtatacccacagcagcctgttcttggccctgtaccttgcaaacgacatggaggaggacctggagggccccaaatgtgagatttttccatgggccctgggaaaagattggtgtttacgagtggggaaattcctgcaccagagggataagctttgggcacggatgggtttccgggctgttgtgagccgccagtgctgtgaggaggtcatggcaaaggagccattccactgggcttggactcgggaccggcgcccccaccatggtggggttcagagggtctgtccacaggtccctgttcgccttccccggggccctggcctctcgccgccccactgttccccctgtggtttgccccagcactgcagcagccacttgcttaagcctgtgtcatccaagtgcccttctctgacctctgaatgtcatcgccctccctcccaaaattatctctcaagggtcaaaaacgcctggggtggggactttctcatcgtcttgcctccccagatgcaactggaaccaggcacctactccctccgcatcttcccaaagcctccggcacgccctgggcactgaagctctgcagggtgaagaacagcacgcctgctggcccactgactgacacaccattggctgtgctcccacccctgccccttc

SEQ ID NO: 792 - DNA, 1647 bp, Homo sapiens
  CDS (37)..(1491)
tttcgtggagaggaaggggcagccctggggaaggcgatgcgtggaggaggctgctcaccccattccccatctgggtgtctttcaggagtcatggccggcttcaacatggggggcgacctcagggagcctgccgccagcattcccctgggctccctggcagctgttggcatctcgtggtttctgtacatcgtcttcgtcttcctcctgggcgccatctgcactcgagaggcccttcgctatgacttcctgatagcggaaaaggtatccctcatgggcttcctgttccttttgggcttatacatctcgtccctggcttcctgcatgggaggactttatggagctccccgcatcctgcagtgcattgcccaggagaaagtgatccctgcacttgcctgtctgggacaagggaaggggccaaacaaaacacccgtggctgccatctgcctgaccagcttggtgaccatggcctttgtttttgtgggtcaagtgaacgttctggcccccatcgtcaccatcaacttcatgctgacatacgttgcagtggactactcttacttctccctgtccatgtgttcctgcagcctgaccccggtgcctgagccggtgctcagggagggcgcagaaggcctccactgctctgagcacctgctcttagagaaagctcccagttacggctctgagggacctgcccaaagagtcttggagggcacgctactggaattcaccaaggacatggatcagctcctccagctaaccaggaagcttgagagtagccagcccaggcaaggagagggtaacaggaccccagaaagtcagaagaggaaaagcaagaaggccaccaagcagaccctacaagatagcttcctcttggacctcaaatcccctccttctttccctgtcgagatctctgacaggttgcccgctgcctcctgggaggggcaggagtcctgctggaacaagcagacttccaagagcgaagggactcagcctgagggaacatatggagagcaacttgttcctgagctgtgcaaccaatcagagtccagtggagaagatttcttcctgaagtccaggctccaagaacaagatgtctggagaagatccacttctttctatacccacatgtgcaacccctgggtctccctgttgggggctgttgggtcccttctcatcatgtttgtgatacagtgggtgtataccctggttaacatgggtgttgctgccatcgtgtatttctacattggccgggccagtccagggcttcaccttggatcagcctccaacttcagctttttccggtggatgaggtctctcttgctcccctcctgcaggagcttgcagtccccccaggagcagatcatcttggcgccgtccctggctaaggttgacatggagatgactcagctcacccaggagaatgcagacttcgccactcgggatcgctaccaccactcctccctcgtgaaccgggagcagctgatgcctcactactagatgcagtgctgggaccttcctcttttggagctgtcccatgtacagtggacccaagctcaggaccttcgtggagctgcttctccaacctgagaaactcaagacccatcctcccgctgtcactttggacaatggaaatctacattttcttttccc

SEQ ID NO: 793 - DNA, 3175 bp, Homo sapiens
  CDS (1750)..(2415)
cgcggtacaccgatgcgctatacaaaggcactcgccgccagcgccgcagtgccagagatgagctcccgagtgtgcgtgggctcagacgtcacctccatccacaagtacatggtgcgtcgctacttcaacaagccgtcaagggtgccagcacccgaggccttccgagaccccatttggtccacatgggcgctgtacgggcgcgccgtggaccaggacaaggtgctgcgttttgcccaacagatccgcctgcaccacttcaacagcagcccactaatgctccagaaccctcaggagaagagccaggcctacccccgccgccgccggcctggctgctacgcatagcgtcagaaccccgaggccatcgcagccgcagctatgtacaccttcctgcccgacaacttctcacctgccaagccaaagccttccaaagagctgaagccgctgctgggctccgcggttctggggctgctgcttgtgctggccgcggtggtggcctggtgctactacagcgtctccctacgcaaggcggagcgacttcgcgcggagctgctggacctgaaagctggcggcttctccatccgcaatcagaagggagagcaggtcttccgcctggccttccgctccggcgcgctggaccttgactcctgcagccgcgatggcgccctgctgggctgctcgctcacggccgacgggctgccgctgcacttcttcatccagactgtgcggcccaaggacacggtcatgtgctaccgcgtgcgctgggaggaggcagcgccgggccgggccgtggagcacgccatgttcttgggcgacgcggcggcccactggtatggtggcgccgagatgaggacgcaacactggcccatccgcctggatggccagcaggagccccagccgttcgtcaccagcgatgtctactcctccgacgccgcgtttgggggcatcctcgagcgctactggctatcttcgcgcgcggccgccatcaaagtcaatgactcagtgcccttccacctgggctggaacagcacggagcgctcgctgcggcttcaggcgcgctaccacgacacgccctacaagccacccgccggccgcgccgcagcgccagagctgagctaccgagtgtgcgtgggctcagacgtcacctccatccacaagtacatggtgcgtcgctacttcaacaagccgtcaagggtgccagcacccgaggccttccgagaccccatttggtccacatgggcgctgtacgggcgcgccgtggaccaggacaaggtgctgcgttttgcccaacagatccgcctgcaccacttcaacagcagccacctggaaatcgacgacatgtacacacctgcttatggcgacttcgacttcgatgaggtcaaattccccaacgccagcgacatgttccgccgcctgcgcgacgccggcttccgcgtcacgctctgagtgcacccttttgtcaactacaactcgtcgcgcttcggcgagggcgtggagcgcgagctgttcgtgcgcgaacccacgggccggttacctgcgctggtgcgctggtggaacggcatcggcgcggtgctagacttcacgcacccaaaggcccgcgactggttccagggacacctgcggcggctgcgctctcgctactccgtggcttccttcaagttcgacgcgggcgaggtcagctacctgccgcgggacttcagcacctaccggccgctgccggaccccagcgtctggagccggcgctacactgagatggcgctgcccttcttctcgctggcggaggtgcgcgtaggctaccagtcacagaacatctcctgcttcttccgcctggtggatcgcgactctgtgtggggctacgacctggggttgcgctcactcatccccgcggtgctcaccgtcagcatgctgggctacccattcatcctacccgatatggtgggcggcaacgccgtgccccagcggacagccggcggcgatgtgcccgagcgcgagctctacattcgctggctggaagtggccgcctttatgccggccatgcagttctctatcccgccctggcgctacgacgcggaagtggtggccatcgcgcagaagttcgccgccctgcgggcctcgcttgtggcaccgctgttgcttgagctggcgggcgaggtcaccgacacgggtgaccctatcgtgcgccccctttggtggattgcgcccggcgacgagacagctcaccgtatcgactcgcagttccttattggggacacgctgcttgtggccccggtgctggagccaggcaggcaggagcgcgacgtctatttgcccgccggcaagtggcgcagctacaagggtgagcttttcgacaagacgccggtgctgctcaccgattacccggtcgacctggatgagatcgcctactttacctgggcgtcctgacccagcccagggcccggtaaccgcaaagcccccagtcttcatgcagaccttgaaccctccgtcacacccgcaccatgtactcccaggaacctcccacctctataccacccattaagtggctgctgacttaaatgtgctggaaccagctgctgaaggtggggcctagggagggggcactgaagcaatctcctgctccaacgcacaatccttactgtgccctttccacccccacactcacaccaatctgcagaaacctcttccctggggtggaagccagagagcttagaggaaaaaggtcagctctcttcctgttatacatggttatacatggttggggtttaaaagcacaaagagaaacctccccctcctggctttcgtggccatctttgtccatcttaggtggggacttgatcttatttaaggtctccaaatagcccccaccacacttagaacgtgtgttttcttagtgttagaagccaggccctgagtccccagcactcacctgaactgtggctgatttggtcccagtccagctggggaggtgtttggctgacaaggaggcaagagatcccctcccagggaacaggaggactgggcttagcacagagccatcatcatgttcccaatttgtgaagagactcctaacactgcactaacccatttgtgtacatacatgggctcagccctgggccaaatgtgcctgatgggaacagacttgcagggccatgcaggccagacttcgtgccttaactgaaga

SEQ ID NO: 794 - DNA, 2277 bp, Homo sapiens
  CDS (252)..(1133)
gatggcagattcttcttctgagatgatgattggaactcatgaaacatgacacatttagacagcccagcgttgatgaattagaaggcaggtcctttcggttggagttgaaaaaagaatggtccccgtgcagcagcttctcagatcctgagtcagagaaaagaaacacctgtgtgttgagagaacaaatcgtggctcagtaccccagtttgaaaagagaaagtgaaaaaatcattgaaaacttcaagaaaaaaatgaaagtaaaaaatggggaaacattatttgaattgcatagaacaacgtttgggaaagtaacaaaaaattcttcttcgattaaagtagtgaaacttcttgtacgtctcagtgactcagttgggtacttattctgggacagtgcaactacgggttacgccacctgctttgtttttaaaggattgttcattttaacttgtcggcatgtaatagatagcattgtgggagacggaatagagccaagtaagtgggcaaccataattggtcaatgtgtaagggtgacatttggttatgaagagctaaaagacaaggaaacaaactacttttttgttgaaccttggtttgagatacataatgaagagcttgactatgctgtcctgaaactgaaggaaaatggacaacaagtacctatggaactatataatggaattactcctgtgccacttagtgggttgatacatattattggccatccatatggagaaaaaaagcagattgatgcttgtgctgtgatccctcagggtcagcgagcaaagaaatgtcaggaacgtgttcagtctaaaaaagcagaaagtccagagtatgtccatatgtatactcaaagaagtttccagaaaatagttcacaaccctgatgtgattacctatgacactgaatttttctttggggcttccggctcccctgtgtttgattcaaaaggttcattggtggccatgcatgctgctggctttgcttatacttaccaaaatgagactcgtagtatcattgagtttggctctaccatggaatccatcctccttgatattaagcaaagacataaaccatggtatgaagaagtatttgtaaatcagcaggatgtagaaatgatgagtgatgaggacttgtgagaattcagtctactggatttaagggaatggcttatggagttgttatttcataggcattgaaaatggttttctaaactccaaaatggtcatcttatcaataataataatattgaccatttcctatctgccaggcatttttctaagcacatgaagaaattagtcctaacaacactatgagatggactataacttgcccaaattctttctttctctttttctgtgagaacgtgtagttctcacctcgtgctcgccgtgggccgtggagtatcacacggtgaggtgcagaactcttccagccttcactgtgcccaaactttcacactcctctccacgcgtctctcaccgccgtacttctttattgcgcttcaagtatcctccctgtgagccacgctgtgcggcacttacctcgcgtaatacacccgctcactacgaacgccaccaccagcgctagcaaacttttatatcatatctattcctgtattagcgtgcgtatctctcttttctagcactggacagatatcaccacggtgtcgtatctcgacacctccagttgtgttgtgcgctccacacgcgtgcgacgtcgctcctgtcaatatcacatcgaagttgagcgcccccagttgcgtagtaacatcccaacacactcatcggacaactctcgtagagccctcccacctccacacacgacagcgacgcagtctacgcggcgcatatattttctcacacaagcactcgactagctgtacaacgcccctaacgtattggttcccactcgcacgggaggtctaaaaacctcatcctcgtcgccccacccaaaacattaacaaacaaagtaactacgtcactatcccaaccacctataccgcttgtcaaccatcctctctactttactctaccctcctccacatacatcacaccatatctacagcctacccatccacccccctaactctctactaacattcttgttactcatccctttatcacactcaactgtatctacctccacaataatcacacaatcacacatacaaccctatcacctctatcactacctaacaaacctactcaacatctccacttacttcattctcctttctattagcacactcataactacaatccttacaccactctcacc

SEQ ID NO: 795 - DNA, 1321 bp, Homo sapiens
  CDS (176)..(841)
gaaattggctgagagaaaaggtcagggtcaggaataacagtttcattatctgagcaactggacatagaggctggcacttgggcacattgtcacaaatctttgtgttgggattaatgccactaacctgtagtgttggggttccatctctgatcattatcagctaaaaatcttcaaaatgtttgtcatgcttcaggtgccctggctgcagagttgtgccaacttggtgcagattggggcacctctcccactactgggctgtttgggccagtattttgaggttctgggaagtatggaagtactggctgggcaatatgggaaggaaatcatcgagttccccatcctaaagctaaatggccggaccatggagattgagtctacctttcacatgtatgtccagcctgtagtccatccacagcttaccccattctgtacagagctcaccgggattattcaagccatggtggatggtcagccaagcctgcagcaagtgctggagagggtcgatgaatggatggcgaaggaaggcctcttagatccaaacgtcaagtcaatttttgtcacctgtggagactgggacttaaaagtcatgctcccaggccagtgccagtacttgggcttgccagtggcggattacttcaagcagtggattaatctgaaaaaggcttacagcttcgccatgggctgctggcccaagaatggacttctagacatgaacaagggcctcagcctgcaacacataggccggccccacagcggcattgacgactgcaagaacattgccaacatcatgaagacactcgcctatcgaggcttcatcttcaagcagacatcgaagccgttctgattggccgaggacaggatggggcaggacagggtagctgtttggcccagcccagaatcctcctctccctcaccagaggggaagagggagagtggcatagctctgtgtccagagtgtccccagctgccctgtgggctcatgcccttggcgtgggcttgtgcccttgcaagggcttggccacttggcccttctggagcagacactttgtgccccccatccccacccctcaatctcagcccagtatcagcccctcccattgcgggcctgggctagggggacccaggcactcaccgcctcctccctggtacacaggcttctgtggggccaccaagcccctcctgtgccccctcccatccatagtgcatggtgtgtggtgcccccagggctccaggacagatcaggccccaccttgtgtctacccccatccccgctgtgaacgtgccactgaataaagtcggggaaacgagaaaaaaaaaaaaa

SEQ ID NO: 796 - DNA, 1051 bp, Homo sapiens
  CDS (40)..(600)
ggagcgggtggcggaggcgattgaagctgctggcccagcatgtggtgcgcgagcccagttgctgtggtggccttttgcgccgggcttttggtctctcacccggtgctgacgcagggccaggaggccgcggggcggcgaggggccgactgtgaagtatgtaaagaattcttgaaccgattctacaagtcactgatagacagaggagttaacttttcgctggacactatagagaaagaattgatcagtttttgcttggacaccaaaggaaaagaaaaccgcctgtgctattatctaggagccacaaaagacgcagccacaaagatcctaagtgaagtcactcgcccaatgagtgtgcatatgcctgcaatgaagatttgtgagaagctgaagaagttggatagccagatctgtgagctgaaatatgaaaaaacactggacttggcatcagttgacctgcggaagatgagagtggcagagctgaagcagatcctgcatagctggggggaggagtgcagggcctgtgcagaaaaaactgactatgtgaatctcattcaagagctggcccccaagtatgcagcgacacaccccaaaacagagctctgatctccaatgccagcacatttgtgacttgtaattagagagaaaagtgactctctaggatatggacatgttgattaaggataactgggaatgcatcatatttggtctcatgctttttgtgttggtattattcctcagaattttgttacgtgggtttatgagtgaaactaatactactgataacttacatttgcagtgtaccaaaagctaaaagttcctttctcataagtttcttggaatgactatgccagttttcattgcctgtctcctaaaagtgacctactgacaaattgatggagtaaattgattccaagaaagaagaaggcattcagagactcctctctggatgcaattttaaaatatattggactaaaacaaaagacacaacagtcagcttatctaatgcacaacttcaatcccaaatacagaatcaaaagttaaaaaaaaaaaa

SEQ ID NO: 797 - DNA, 6127 bp, Homo sapiens
  CDS (241)..(5259)
atgccaaggagaaggaaaaatcttgggggaaatccttttcggaagactgcaaaccctaaggaagttgtcgtatccagtgttgctagtcgtgaggagccaaccactactctaccttccatgggtgagacaaaagttgatcaggaagaactcttcaccagtatctcagagatattttctgatctggatcctgatgtagtgtatttgatgctttctgaatgtgatttcaaagttgaaaatgctatggattgtctattagaattatctgccactgataccaagatagaagaatcatcttcacaaagtttcgttgcttctgagaaccaagtaggtgcagcagaaagtaaaataatggaaaaacgtcctgaagaagagagtgaagattcaaaaatggattcatttttggacatgcagctaactgaagacctggattccttaatacagaatgcttttgagaaattgaactcttctcctgatgaccaagtatactcatttttgccttcacaagatgttaatagttttaatgactcaagtgagtttataaatcctgattcaagtaatatgactcccattttttctacacaaaatatgaatttgaacggtgaaaatttagagaattctggttctactttaagtttaaacccattaccttcacattcagttttgaacgagtccaagtgttttataaaggataacacattggctttggaaagtaactacccggaagattctcttctcagtagttctttaaatgtagcaagtgactccatcgcaggttgtagcagtctcaatcaaaaacagaaagaacttttagaatctgagtgcgttgaggctcaattctctgaagctcctgtagatttggatgccagtgaacctcaggcttgtttaaaccttccagggcttgatttaccaggtacaggtggggatcagaaatctactcgggtctctgatgtgtttctaccttccgaagggttcaacttcaagccacacaaacatcctgaactgccaactaaggggaaggatgtgagttactgcccggtacttgctcctctcccattgctgttgcctcctccgccacctccaccgatgtggaatccaatgattcctgcttttgacctcttccaaggaaaccatggctttgtagctcctgttgtaaccacagctgcacactggagatctgtcaactacacatttccaccctcagttatttctcacacttccccaacaaaagtatggagaaataaagatggaacaagtgcttatcaagtacaagaaaccccagtttctcaggttgtaagaaagaagacatcttacgttggactagttcttgttcttctcagaggtcttccgggatctggaaaatcttttttggcaaggactttgcaagaggataatccaagtggagtcattcttagtactgatgattatttttatataaatggacagtaccagtttgatgtaaagtacttaggagaagcacatgaatggaaccagaatcgtgcaaaagaagcatttgagaagaagatatctcctataattatagataatacaaacctacaggcatgggaaatgaaaccatatgttgctttgtctcagaaacacaaatataaagtcctttttcgggaaccagacacatggtggaagtttaaaccaaaggaacttgcaaggcgtaacattcatggggtaagcaaagaaaaaataacaagaatgttggaacattatcaacgttttgtttcagtgccaataattatgagttcttcggttccagagaaaattgaacgtattgagttgtgtgcatattcttgtgaggatagaagcactagcccaagagacgatgaagatattatctctgaaaaagaagaaaatattttatctttatctttgaagcatctagagttcactgaagagaagaatcttgatgtaaccaaagaaacaatgttacctgagaatgttgcatatctctctaatgcagatttaaacaaaaaaaaaaaaaaaataagtgatatgaatcctagcattcaaagtgctttaattctggaaactccacacatgtatttttctgactctgaaagcaaactacaggcaacagacaaaagtgaaaacgagcaaatagaaatggtggctgtaaaagggtatagtaaaactgacacagatagttctatggagagagtatcacctagtacttgctgtagtgaaaataatcaagaagactgtgatcttgcaaatagtggaccacttcaaaatgaaaaatcctcacctggtgaaatagtggaagaaagagcaacagtaacgaaaaaagcctttgggaaacaaaaaagcaaatcgactttggaagagttcccaagacatgagctatcaaattttgttggtgactggccagttgataagactattggtcagaggacaaaaaggaacagaaaaactgaaaaaacttcatccgtacaaagcgacaaaaagtataattaccctcagtcacacaaattagttaacagtgtatctgtgaatacagattgtgtccagcaacgaggatctccacatgaaagtgtagaggatggcagaaagtcacagtgtgatgatgcttcagagccactcaatagctataaatatgatgcttataaaaatattgacaaaaactcattcaacattatgggtgactggccttcatctgattctttagctcagagggaacacagatcaagaatgccaaagactggtttaagtgagcccaacctagaaattggaacaaatgacaaaatgaatgaaatatccttatctacagcacatgaggcctgttggggcacaagctctcaaaaactaaagacattgggtagctccaatctaggaagttctgaaatgctgctcagtgaaatgacctgtgagagtcagacttgtctaagtaaaaagagtcatgggcaacacacatcgttgcctcttacttttaccaatagtgcaccaactgtttctggagtagtagaaccacaaacgttagctgaatgtcaagagcaaatgcctaagagagaccctggaaaagaagtaggcatgtgcacccagactgaaccacaggattttgctcttttatggaaaatagaaaagaataaaattagcatttcagattctatcaaagtattaacaggaagattagatggatttaagccgaaagttttcaatattaacacaaaatcagacgttcaagaagcaattccatatagagtaatgtatgataaaagcacgtttgttgaagaaagtgagcttaccagtgcagatgaatctgaaaatcttaacattctttgtaaactgtttggatccttttcattagaagccctgaaagacttatatgagaggtgcaataaagatattatttgggccacaagccttttgttggattctgaaactaagttatgtgaggatacagagtttgagaatttccaaaaatcgtgtgatggatcacaaattgggcctttttctctggggttgaatttgaaagaaattattagccaaagaggaactttagagaattctaattctcctgtgccagagtttagccatgggattggtattagtaacgctgactcacagtctacttgtgatgcagaaagaggaaactcagagcaggcggaaatgagagctgtcactcctgaaaaccatgaatcgatgacaagtatatttcccagtgctgctgtgggtctaaagaataataatgacatacttcctaacagccaggaagaacttttatatagcagtaagcagtcctttccaggtattctaaaagctactactcctaaagatatgagtgaaacagaaaaaaacctagtagtcacagagactggagacaacatacattctccttcacatttctctgatatttttaactttgtatctagtacttcaaatcttgaattaaatgaagaaatttattttactgattctcttgaaataaagagaaatgaaaattttccaaaggattatgtgaaattttcagatgaagaagaatttatgaatgaagatgagaaggaaatgaaggaaattctaatggcaggaagtagtttatcagctggagttagtggggaagataaaaccgagatattgaatcccactccagcgatggccaaatctctgaccatagactgtctggaattggcattaccccctgaactggcttttcaacttaatgaattatttggtcctgttggtattgattcagggtctctaacagttgaagattgtgtggttcatatagatctgaatctggcgaaagtgattcatgagaaatggaaagaatctgtaatggagcgacaaagacaagaagaggtgtcttgtggcaagtttatgcaagatccttccttggttggacatactgggcttgataatcctgaacaaaaatcatctcagagaacaggcaaaaaattactgaagactttaacagcatctgaaatgctacctttattggatcattggaatactcaaactaaaaaagtatcactcagagaaataatgtcagaagaaattgccttacaggaaaaacataatttgaaaagggagacccttatgtttgaaaaagattgtgccactaaactaaaggagaagcagctctttaagatatttccagccattaaccaaaattttctggtggacattttcaaggaccacaactattcattagaacacacagtgcaatttcttaactgtgttcttgaaggggaccctgtaaaaacagttgtagcccaagagtttgttcaccaaaatgagaatgtcacatctcatactggccagaagtctaaagagaaaaaggactttgagtacccagactatgatgactacagagcagaggctttccttcaccaacagaagaggatggagtgctacagcaaggccaaagaagcttatcggatagggaaaaaaaatgtcgccaccttttatgcccagcagggtactcttcatgagcagaagatgaaagaagccaatcaccttgctgccatagagatctttgagaaagtcaatgcttcgctgctgccacagaatgttttagacctccatgggctgcatgtggatgaagctctagaacatttgatgagagttttagagaagaagactgaagaatttaagcagaacggtgggaagccctatttgtctgtgattacggggagaggaaaccacagccagggaggagttgctcgcatcaaaccagctgtcattaagtacctcataagccatagcttcaggttctctgaaattaaaccagggtgcttgaaagtcatgctaaagtaaaataaacatccttgaattagaagtatgaaggtttgtaggttaaaattacttttatttgcagtaattcagtcaattctaccctaaagatgtgttttattataaataatattcaattatgaaacaaaaaaattatgatgtttttcaaaatgcaagtgaggtttgattttttactgaatcaaatgcaaatgttacctgttaaagatattacagagaaattttattgattacaaaatatgtaagaaaattatcagctacagttttaaagtttaaaatgctctgattgtttctcagaaaaggttacctttgtattaattgttgtatgacatttagtaatgtcctaaaagtcttttgtgagaggtatttaaagtgctttgagacctgattcatgccccccaaagggtggtattaaaagaggaaaaaggacatagtagtggtagtaaagaaaaaaaggagatctaacaaaaacacttgaatattttttattttcaaaactaaacacataaaatgcttttattttgccatatcctacaggaaggaagacatgcttttgccctttcttctgctttgtatatgaccttgatcttttaccttttgttctgttcttctgtgtgcattttatggaaagaaagttgggtctgagattatattgtaattttatactttctatagacagaaaggttttcagagaaaaagaaatggttaaatatcttccagatgttgctgccttatcgaaatgcttctagaactgtctgtataagtcgtatttcagacagtactaaatacttatattttatttttgaggcatgtaattttaaaactgcagtaggttaaaattctattaaacaaatatagaaaatattttgtt

SEQ ID NO: 798 - DNA, 6178 bp, Homo sapiens
  CDS (241)..(5310)
atgccaaggagaaggaaaaatcttgggggaaatccttttcggaagactgcaaaccctaaggaagttgtcgtatccagtgttgctagtcgtgaggagccaaccactactctaccttccatgggtgagacaaaagttgatcaggaagaactcttcaccagtatctcagagatattttctgatctggatcctgatgtagtgtatttgatgctttctgaatgtgatttcaaagttgaaaatgctatggattgtctattagaattatctgccactgataccaagatagaagaatcatcttcacaaagtttcgttgcttctgagaaccaagtaggtgcagcagaaagtaaaataatggaaaaacgtcctgaagaagagagtgaagattcaaaaatggattcatttttggacatgcagctaactgaagacctggattccttaatacagaatgcttttgagaaattgaactcttctcctgatgaccaagtatactcatttttgccttcacaagatgttaatagttttaatgactcaagtgagtttataaatcctgattcaagtaatatgactcccattttttctacacaaaatatgaatttgaacggtgaaaatttagagaattctggttctactttaagtttaaacccattaccttcacattcagttttgaacgagtccaagtgttttataaaggataacacattggctttggaaagtaactacccggaagattctcttctcagtagttctttaaatgtagcaagtgactccatcgcaggttgtagcagtctcaatcaaaaacagaaagaacttttagaatctgagtgcgttgaggctcaattctctgaagctcctgtagatttggatgccagtgaacctcaggcttgtttaaaccttccagggcttgatttaccaggtacaggtggggatcagaaatctactcgggtctctgatgtgtttctaccttccgaagggttcaacttcaagccacacaaacatcctgaactgccaactaaggggaaggatgtgagttactgcccggtacttgctcctctcccattgctgttgcctcctccgccacctccaccgatgtggaatccaatgattcctgcttttgacctcttccaaggaaaccatggctttgtagctcctgttgtaaccacagctgcacactggagatctgtcaactacacatttccaccctcagttatttctcacacttccccaacaaaagtatggagaaataaagatggaacaagtgcttatcaagtacaagaaaccccagtttctcaggttgtaagaaagaagacatcttacgttggactagttcttgttcttctcagaggtcttccgggatctggaaaatcttttttggcaaggactttgcaagaggataatccaagtggagtcattcttagtactgatgattatttttatataaatggacagtaccagtttgatgtaaagtacttaggagaagcacatgaatggaaccagaatcgtgcaaaagaagcatttgagaagaagatatctcctataattatagataatacaaacctacaggcatgggaaatgaaaccatatgttgctttgtctcagaaacacaaatataaagtcctttttcgggaaccagacacatggtggaagtttaaaccaaaggaacttgcaaggcgtaacattcatggggtaagcaaagaaaaaataacaagaatgttggaacattatcaacgttttgtttcagtgccaataattatgagttcttcggttccagagaaaattgaacgtattgagttgtgtgcatattcttgtgaggatagaagcactagcccaagagacgatgaagatattatctctgaaaaagaagaaaatattttatctttatctttgaagcatctagagttcactgaagagaagaatcttgatgtaaccaaagaaacaatgttacctgagaatgttgcatatctctctaatgcagatttaaacaaaaaaaaaaaaaaaataagtgatatgaatcctagcattcaaagtgctttaattctggaaactccacacatgtatttttctgactctgaaagcaaactacaggcaacagacaaaagtgaaaacgagcaaatagaaatggtggctgtaaaagggtatagtaaaactgacacagatagttctatggagagagtatcacctagtacttgctgtagtgaaaataatcaagaagactgtgatcttgcaaatagtggaccacttcaaaatgaaaaatcctcacctggtgaaatagtggaagaaagagcaacagtaacgaaaaaagcctttgggaaacaaaaaagcaaatcgactttggaagagttcccaagacatgagctatcaaattttgttggtgactggccagttgataagactattggtcagaggacaaaaaggaacagaaaaactgaaaaaacttcatccgtacaaagcgacaaaaagtataattaccctcagtcacacaaattagttaacagtgtatctgtgaatacagattgtgtccagcaacgaggatctccacatgaaagtgtagaggatggcagaaagtcacagtgtgatgatgcttcagagccactcaatagctataaatatgatgcttataaaaatattgacaaaaactcattcaacattatgggtgactggccttcatctgattctttagctcagagggaacacagatcaagaatgccaaagactggtttaagtgagcccaacctagaaattggaacaaatgacaaaatgaatgaaatatccttatctacagcacatgaggcctgttggggcacaagctctcaaaaactaaagacattgggtagctccaatctaggaagttctgaaatgctgctcagtgaaatgacctgtgagagtcagacttgtctaagtaaaaagagtcatgggcaacacacatcgttgcctcttacttttaccaatagtgcaccaactgtttctggagtagtagaaccacaaacgttagctgaatgtcaagagcaaatgcctaagagagaccctggaaaagaagtaggcatgtgcacccagactgaaccacaggattttgctcttttatggaaaatagaaaagaataaaattagcatttcagattctatcaaagtattaacaggaagattagatggatttaagccgaaagttttcaatattaacacaaaatcagacgttcaagaagcaattccatatagagtaatgtatgataaaagcacgtttgttgaagaaagtgagcttaccagtgcagatgaatctgaaaatcttaacattctttgtaaactgtttggatccttttcattagaagccctgaaagacttatatgagaggtgcaataaagatattatttgggccacaagccttttgttggattctgaaactaagttatgtgaggatacagagtttgagaatttccaaaaatcgtgtgatggatcacaaattgggcctttttctctggggttgaatttgaaagaaattattagccaaagaggaactttagagaattctaattctcctgtgccagagtttagccatgggattggtattagtaacgctgactcacagtctacttgtgatgcagaaagaggaaactcagagcaggcggaaatgagagctgtcactcctgaaaaccatgaatcgatgacaagtatatttcccagtgctgctgtgggtctaaagaataataatgacatacttcctaacagccaggaagaacttttatatagcagtaagcagtcctttccaggtattctaaaagctactactcctaaagatatgagtgaaacagaaaaaaacctagtagtcacagagactggagacaacatacattctccttcacatttctctgatatttttaactttgtatctagtacttcaaatcttgaattaaatgaagaaatttattttactgattctcttgaaataaagagaaatgaaaattttccaaaggattatgtgaaattttcagatgaagaagaatttatgaatgaagatgagaaggaaatgaaggaaattctaatggcaggaagtagtttatcagctggagttagtggggaagataaaaccgagatattgaatcccactccagcgatggccaaatctctgaccatagactgtctggaattggcattaccccctgaactggcttttcaacttaatgaattatttggtcctgttggtattgattcagggtctctaacagttgaagattgtgtggttcatatagatctgaatctggcgaaagtgattcatgagaaatggaaagaatctgtaatggagcgacaaagacaagaagaggtgtcttgtggcaagtttatgcaagatccttccttggttggacatactgggcttgataatcctgaacaaaaatcatctcagagaacaggcaaaaaattactgaagactttaacagcatctgaaatgctacctttattggatcattggaatactcaaactaaaaaagtatcactcagagaaataatgtcagaagaaattgccttacaggaaaaacataatttgaaaagggagacccttatgtttgaaaaagattgtgccactaaactaaaggagaagcagctctttaagatatttccagccattaaccaaaattttctggtggacattttcaaggaccacaactattcattagaacacacagtgcaatttcttaactgtgttcttgaaggggaccctgtaaaaacagttgtagcccaagagtttgttcaccaaaatgagaatgtcacatctcatactggccagaagtctaaagagaaaaagccaaagaaattaaaagagactgaagaaacaccaagtgaactgtctttccaggactttgagtacccagactatgatgactacagagcagaggctttccttcaccaacagaagaggatggagtgctacagcaaggccaaagaagcttatcggatagggaaaaaaaatgtcgccaccttttatgcccagcagggtactcttcatgagcagaagatgaaagaagccaatcaccttgctgccatagagatctttgagaaagtcaatgcttcgctgctgccacagaatgttttagacctccatgggctgcatgtggatgaagctctagaacatttgatgagagttttagagaagaagactgaagaatttaagcagaacggtgggaagccctatttgtctgtgattacggggagaggaaaccacagccagggaggagttgctcgcatcaaaccagctgtcattaagtacctcataagccatagcttcaggttctctgaaattaaaccagggtgcttgaaagtcatgctaaagtaaaataaacatccttgaattagaagtatgaaggtttgtaggttaaaattacttttatttgcagtaattcagtcaattctaccctaaagatgtgttttattataaataatattcaattatgaaacaaaaaaattatgatgtttttcaaaatgcaagtgaggtttgattttttactgaatcaaatgcaaatgttacctgttaaagatattacagagaaattttattgattacaaaatatgtaagaaaattatcagctacagttttaaagtttaaaatgctctgattgtttctcagaaaaggttacctttgtattaattgttgtatgacatttagtaatgtcctaaaagtcttttgtgagaggtatttaaagtgctttgagacctgattcatgccccccaaagggtggtattaaaagaggaaaaaggacatagtagtggtagtaaagaaaaaaaggagatctaacaaaaacacttgaatattttttattttcaaaactaaacacataaaatgcttttattttgccatatcctacaggaaggaagacatgcttttgccctttcttctgctttgtatatgaccttgatcttttaccttttgttctgttcttctgtgtgcattttatggaaagaaagttgggtctgagattatattgtaattttatactttctatagacagaaaggttttcagagaaaaagaaatggttaaatatcttccagatgttgctgccttatcgaaatgcttctagaactgtctgtataagtcgtatttcagacagtactaaatacttatattttatttttgaggcatgtaattttaaaactgcagtaggttaaaattctattaaacaaatatagaaaatattttgtt

SEQ ID NO: 799 - DNA, 1350 bp, Homo sapiens
  CDS (171)..(1034)
tttcgttgccattgcagatcaacacgcactttaaataatcaaaacccctatctttcccctgggaaggaggaagccgaggaaggctgtgtttctgactcacacgggggagtcgggggagtcgtaaacaaccctgaagagaacagccaggcctgttcccgcaagcccagacaatgccggtggaggaatttgtggctggctggatctctggcgctctgggcttggtcctgggacacccgtttgacactgtaaaggtgaggctgcagacccagaccacctaccggggcatcgttgattgcatggtcaagatttaccgccatgagtccctcctgggcttcttcaagggaatgagcttccccattgccagcatagctgtggtcaactctgtcctgtttggggtctatagcaacaccctgctggtgctcacggccacctcccaccaggagcggcgggcccagccgcccagctacatgcacatcttcctagcgggctgcaccggggggttcctgcaggcctactgtctggctccttttgacctcatcaaagtccggctacaaaaccagacagagccaagggcccagccagggagccccccaccccggtaccaggggcccgtgcactgtgcagcctccatcttccgggaggaggggccccgggggctgttccgaggagcctgggccctgacgctgagggacacccccacggtggggatctacttcatcacctatgaagggctctgtcgccagtacacaccagaaggccagaatcccagctcagccacggtgctggtggcagggggctttgcaggcattgcttcctgggtggcagccacgcccttagacgtgatcaagtcccggatgcagatggatggactgagacgcagagtgtaccaggggatgctggactgcatggtgagcagcatccggcaggaaggactgggagtcttcttccggggggtcaccatcaacagtgcccgcgcctttcccgtcaatgctgtcaccttcctcagctacgaatatctcctccgctggtggggatgagccctgcggcaatgccagcagctccccatcaggcccacggcctggaggccagtttgagattggaggccaggttgaaagcttgcaaatcagtgcaagaggctcagcccttcctaaccaaggtgcctcccacccgcgcagatctgggctgggcagacacctgtgggagccggaagccagggggcctgtgcagcctccctgtgtagctggccttgactcctttgcctcccacatctgtgaaacagggagcatgaggcacaagtgagctggcaagtggtgctggtgacatcccagctcctgtcctgtgccttcacct

SEQ ID NO: 800 - DNA, 1975 bp, Homo sapiens
  CDS (1)..(1365)
atgactgggacccacttacataggactatcaaaacttatctgcagcaaattggagttgatatggataaaatacatggccaggcctatgatagcaccactaatttgaagataaaatttaataaaatagcagcagaattcaagaaagaagaaccaagagctttatacatacattgttatgcacactttttggatttatcaataattaggttttgtaaagaagtaaaagaactccgaagtgctctaaaaactctcagttctttgttcaacactatttgtatgtctggggaaatgttggcaaattttcgaaacatttataggctaagtcaaaacaaaacatgcaagaaacatatatcacaatcatgttggacagtccatgatcgtacattactatctgtgattgacagtcttccagagattattgaaacattggaagttatagcaagccattcttcaaatacaagtttcgccgatgaattgagtcatttgctgacattggtttccaaatttgaatttgtcttttgtttgaaattcctgtatcgagtgctgagtgttacaggaattctttccaaagagcttcaaaataaaaccatagacattttttctttgtcttcaaaaatagaagcaattttggaatgtttatcatctgaaagaaatgacgtatactttaaaacaatctgggatggaacagaggaaatatgtcaaaaaataacctgtaaaggttttaaagttgaaaaaccttctcttcagaaaagaagaaaaattcagaaatcagtagatcttggcaattcagataatatgttttttcctacttcaacagaagaacaatataaaattaatatctattaccaaggattagatactatattacaaaatttaaagttatgtttttcggagtttgattattgcaaaataaagcaaatttcagaactgttatttaaatggaatgaaccattaaatgaaacaacagcaaaacatgttcaggaattttataaacttgatgaggacattatcccagaacttagattttatcgacattatgcaaagcttaactttgtcatagatgatagttgcataaacttcgtcagtctcggctgtttgtttattcagcatggtcttcacagtaatattccttgtctctcaaagctattatatattgctttgtcttggccaattacttcagcaagtactgagaactcattttctaccctgcctcgtcttaagacatatttatgtaataccatgggacaagagaagcttactggcccagccctaatggctgttgagcaggagttggtaaataaactaatggagcctgaaagactcaatgaaattgtggaaaagtttatcagtcagatgaaagaaatataatacatgctcatttgaacttacctaaaagacttgtatttccattgggatgttttcatttcaaaattgttcaaaattcaaaagacacagaacgataaacagtgaagtctccttccctcctttagaactcattttctcttcccaaaaagtgttatcttttccttaaatatccctctagaggtatttttcctaagtggtattgtacggtgtatactgttcttcagcttgtcttctctgtgtaacatatttttgagattgtcccatgtcgttacatgaagagtttcttgattcttggtctataattgcagatgttattgtatgaatgtaccataatatatttgagcagtccctgctgacatttttttcctaaccttttgctattataaataatgattcattttataaccttttatataggtcacattgcacatgagtgagttactgtaagctggaaatctaaagttagaattactaggttaagatatgtgcatttttacttttgatagatattggcaagttgccatctataaggattgtgccagtttacagtcccacccacaatgcatgagagtgcctattaaatctttgtaagtgttaaaaaaaaaaaaaa

SEQ ID NO: 801 - DNA, 3049 bp, Homo sapiens
  CDS (386)..(3046)
ggcccgggagaggggacttgagcgcttcgcggccggtgcgcagcgcggctccggccccgcagtctgtctgcaagtggccatccccgcccccgactcctgcggccggtgcgggagctgtcagctgcacgttgcgggggtaccggagaagccggggttgccttctcccggttctgtgcgctaaccccggagcccggccccggggaactagggagcgtctccggctgcacagcgctcaggttttagggtttcctttgggccacccaaaatgttttttaaatactttggataagagctaaaccacctgccactggggacttccatactctcggctcccttgtcatctgatggcattttgattgtctcgaggccaagtgacttgctgtccatgatgagtgatgagaagaaccttggtgtgtcccaaaaattggtatcaccttcaaggagcacaagtagctgctcttccaagcaaggaagtcgacaggacagctgggaagtggtggaaggactgaggggggagatgaattacacccaggagccaccagttcagaaaggatttttgctgaaaaagaggaagtggcccttaaaaggctggcataagagattcttctatctggacaaaggaatcttgaaatatgccaagagccaaaccgatatagagagagagaagctgcatggctgcattgatgtcgggctctcagtgatgtctgtaaagaagtcatcaaaatgcatagaccttgacaccgaggagcacatctaccatctgaaggtcaagtcagaagaagtctttgatgagtgggtatcgaaacttcgccaccacagaatgtatcgtcagaatgaaattgccatgtttccacatgaagttaaccactttttctcagggtccaccatcacagactcttcatctggggtgtttgactccatttcaagtaggaagcgtagcagtatatcaaagcagaatttatttcaaactggaagcaatgtatcattttcttgtggtggtgagacacgagttccattatggttacagtcttcagaggacatggaaaaatgctccaaagacctggcgcactgtcatgcctacctggtagaaatgagccagctcctgcaaagcatggacgtcctgcatcggacatactcggcaccagctatcaacgccatccagggtggatcttttgaaagtcccaaaaaggaaaaaagatcgcacaggaggtggcggtccagagctattggcaaagatgctaaaggaacactgcaggtcccgaaacctttttctggcccagtaagactacactcctccaatcctaatttgtcaacactagattttggagaagagaaaaattattctgatggctctgaaacctcatcagagttttctaaaatgcaagaagatctgtgtcatattgcccataaagtttacttcactttaaggtcagcttttaatatcatgtcagcggagagagagaaactgaagcagctgatggagcaggatgcctcctcctccccgtctgctcaggtcattggtctgaagaacgccctgtcatccgccctagcacaaaacacagatcttaaagaacgcttacgcagaatccatgccgagtctctgctcctcgactcccccgctgtcgccaagtcgggtgacaatctggcagaggaaaactccagagatgaaaaccgagctctagttcatcagctttctaatgaaagtagactctccatcactgactccctttctgagttttttgatgctcaggaagttctgttatctccaagctcttcagaaaacgagatttctgatgatgactcatatgtcagtgacataagtgataatctttccttagataatctcagtaatgatttagataatgagagacagaccttggggcctgtccttgatagtggtcgggaagcgaagtcccggagaagaacgtgcctgccggcgccctgcccgagcagcagtaacatcagcctgtggaacatcctgaggaacaacatcgggaaggacctgtccaaggtggccatgccggtggagctgaacgagcccctgaacacgctgcagaggctctgcgaggagctggagtacagcgagctcctggacaaggccgcgcagattcccagccccctggaaaggatggtatatgtggcagcctttgccatatcagcgtatgcatctagctactaccgagctggaagcaagccatttaatccggttcttggagaaacatatgaatgtattcgggaggacaagggcttccagtttttttcagaacaggtcagccaccatccgcctatctctgcgtgtcatgctgagtctagaaattttgttttctggcaagatgtgagatggaaaaacaaattctggggcaaatccatggaaattgttccaattggcacaacccatgtgactctgccagtttttggggatcattttgagtggaacaaagtgacctcttgcatccataacatcttaagcgggcagaggtggattgagcactatggagagattgtcatcaagaacctgcatgatgattcctgctactgcaaagtgaattttataaaggcaaaatactggagcactaatgcccatgagattgaaggcacagtgtttgacaggagtggaaaagcggttcatcggctgtttgggaaatggcatgaaagcatctactgtggcggcggctcctcttctgcctgtgtatggagagcaaatcctatgccgaaaggctacgagcaatactatagcttcacacagtttgcgctggaattaaatgaaatggatccatcatcaaagtctttattgccacctactgacactcgatttaggccagaccagaggtttctagaggaagggaacttagaagaagctgaaatacaaaagcagaggattgaacaactgcagagagaaaggcggcgggtcttagaagaaaatcatgtggagcaccagcctcggtttttcaggaaatccgacgatgactcttgggtgagcaacggcacctatttggaacttagaaaagatcttggtttttccaaactggaccatcctgtcttatggtga

SEQ ID NO: 802 - DNA, 3398 bp, Homo sapiens
  CDS (249)..(1844)
tttcgtgcctccgctcccgcgcggttgggagtgtccagcgccctccgcgatttgggctccagcgggcagggtgacttcctttttctgcccactctggtaacttattgctctgctgggctctttcccttagggtctctggccctgttcttgccccagcatgacttttatcgggacgccgttgtggaagcctcacgcaggagccctgcccccgtggagaagatcccactggtgactccaaccctaccaccatgaatggggtcctgatcccccatacgcccatcgcagtggacttctggagcctgcgccgggctggcaccgcacgtctcttcttcttgtctcacatgcactcggaccacaccgtgggcctgtctagcacctgggcccggcccctctactgctccccaattacagcccacctcttgcatcgtcacctacaggtatctaagcaatggatccaagccctggaggttggtgagagccatgtattacccctagatgaaattggacaagagaccatgaccgtaaccctcctcgatgccaatcactgtcctggttctgtcatgtttctctttgaaggatattttggaaccatcctctacacaggtgattttcgatacacaccatccatgctaaaggagccagccctgacactggggaaacagatccatactttatacctagacaacaccaattgcaatccagccctggttcttccttcccgacaagaagctgcccaccagattgtccagctcattcgaaaacacccacaacataacataaagattggactctacagcctgggaaaggaatcactgctggagcagctggccctggagtttcagacctgggtggtattgagtcctcggcgcctggagttggtacagctactgggcctggcagatgtgttcacagtggaggagaaggctggccgcatccatgcagtagaccatatggagatctgccattccaacatgctgcgttggaaccagacccaccctacgattgctatccttcccacaagccgaaaaatccacagctcccaccctgatatccacgtcatcccttactctgaccattcctcttactccgagcttcgtgcctttgtcgcagcactgaagccttgccaggtggtgcccattgtaagtcggcggccctgtggaggctttcaggacagtctgagccccaggatctccgtgcccctgattccggactctgtacagcaatacatgagttcttcctctagaaaaccaagccttctctggctgttagaaaggaggctaaagaggccgagaacccaaggtgttgtgtttgaatcccctgaggaaagtgctgatcaatctcaagctgacagagactcaaagaaggccaagaaagagaaactttctccctggcctgcggaccttgaaaagcagccttcccaccatcctttgcggatcaagaagcagttgttcccagatctctatagcaaagaatggaacaaggcagtgcctttctgtgagtctcaaaagagggtgactatgttgacggccccactgggattttcagtgcacttaaggtctacagatgaggagtttatttctcaaaaaaccagggaggaaattggtttagggtcccccttggtacccatgggagatgatgatggaggtccagaagccacagggaatcagagtgcctggatgggccatggttctcccctgtcccacagcagcaagggcacccctcttctagctactgaattcaggggtctagcactcaaatatcttctgactccagtgaactttttccaggcagggtattcttccaggagatttgaccagcaagtggaaaaataccataaaccctgctgaagacaggagagtacagaatgacaacattgagcccacactgcagttttgaagatagtaactgatggctggtgggaaagagtttgtttttggggcctacttttctatctttacaagactcttatgggcccaccgtggagcagcacttcccaaaacttgttcactggggtcctcgtgcctatggaatccttctttttataactaagtttaagaaatactttttttataaaatctttggagtatgcgtgagcaaattaaaagttctttgaagtcctacagtaacttaatctgtttaaccttgtttaacccagtatttctcaaacttttgtgaacatgcaatcatcttatgtgggtacagaaagaggtaaagagtctgaatcaaaaaggaccaggttattgctgttgctgttttgtggtgtcatgagccattctccatgtccccttctccctcttctcagatcaaaatccctagggagttctatttttaaaattatgaactatggcgctgcatgcttcaatcctgaacgtcactgacttgctgtgaccatccaaataattttcctgtctctgcctctgggagggaacaggaagcgatgaagaggtcttggaacagtagtgaaaattctacctctatgtccttcatgaggatgtgcagtatcccagtatcactgggatccatgtggaacagagccagctggggggttgggcagctctctccaaggcagtacctagagcccagctgaacaacaaggctttgggtgtgaagggactccccagcctggagaccctatttggctgaaacagttacaaaatatcaaatgtgttgtcagatattcctccaattgttcacatagctgggatatttgttgctcccctcaccccttggattatgtagggagccagtgcacacagcctgtttgttttagtatccaaggaagagaccaaggagccagctggcgggaaggggtgggggtgtgcagtctgccctgtccttctgctcataacctgacaaaatgccaaactagtaagcaggatagctgataccacggctatgagggagtaggctctgagagggcacagacttgtggagctgggcgtctggatcaaaactgctttgggatggaacctcgagccctagcagtgaagaagattccatttcttgtccaggggatttaaaagagttttctgctttgagagagaaatagagagtttagaaagcaattgctcttgggaacgcgctacagaggatcctgtgtggtcgagtgaccgatgggaaggcctgcagacggaccatgaggaagcacacagacgggcagcatttgcgtgcagcaggacccaagggggcaggcctagctcaagctggggccccgagacaacgtaagcgggggcaaagcccacgacagcagaggtccaccccaagtaccaggaaatgcaggtggaaagccacgcagagcgcacgagggctcaacggaagaccgctgagaagcgatcacacgcgcagcaacgacccaacgcagatacccgcaaaagtagaggataagacaagacaccagg

SEQ ID NO: 803 - DNA, 2307 bp, Homo sapiens
  CDS (172)..(2304)
tttcgtcaggaacatcccagagagagctgggcccatcctcagccctacccagccccgcagcccctagccctccgcccagaaacccagccctgtccggcgtgccgctcttctcctccaggccggctgctgctgcggccagcgttgccggggcatcccttcctccttcccatcatggcagtgtaccgcctgtgtgtgaccactggtccctacctgagggccggcacactggacaacatctctgtcacactggtgggcacgtgtggtgaaagccccaagcagcggctagatcgaatgggcagggacttcgcccctggatcggtacagaagtacaaggtgcgttgcacagcggagctgggtgagctcttgctgctgcgtgtacacaaggagcgctacgctttcttccgcaaggactcttggtactgtagccgcatctgtgtcaccgaaccggatggtagtgtatcccacttcccctgctatcagtggattgaaggctactgcaccgtggagctgaggccaggaacagcaagaactatttgtcaggactctcttcccctcctcctggatcacaggacacgggagctccgggcccgacaagaatgctaccgctggaagatctatgcccctggcttcccctgcatggtagacgtcaacagctttcaggagatggagtcagacaagaaatttgccttgacaaagacgacaacttgtgtagaccagggtgacagcagtgggaatcggtacctgcccggcttccccatgaaaattgacatcccatccctgatgtacatggagcccaatgttcgatactcagccaccaagacgatctcgctgctcttcaatgccatccctgcgtccttgggaatgaagcttcgagggctgttggatcgcaagggctcctggaagaagctggatgacatgcagaacatcttctggtgccataagaccttcacgacaaagtatgtcacagagcactggtgtgaagatcacttctttgggtaccagtacctgaatggtgtcaatcccgtcatgctccactgcatctctagcttgcccagcaagctgcctgtcaccaatgacatggtggcccccttgctgggacaggacacatgcctgcagacagagctagagagggggaacatcttcctagcggactactggatcctggcggaggcccccacccactgcctaaacggccgccagcagtacgtggccgccccactgtgcctgctgtggctcagcccccagggggcgctggtgcccttggccatccagctcagccagacccccgggcctgacagccccatcttcctgcccactgactccgaatgggactggctgctggccaagacgtgggtgcgcaactctgagttcctggtgcacgaaaacaacacgcactttctgtgcacgcatttgctgtgcgaggccttcgccatggccacgctgcgccagctgccgctctgccaccccatctacaagctcctactcccccacactcgatacacgctgcaggtgaacaccatcgcgagggccacgctgctcaaccccgagggcctcgtggaccaggtcacgtccatcgggaggcaaggcctcatctacctcatgagcacgggcctggcccacttcacctacaccaatttctgccttccggacagcctgcgggcccgcggcgtcctggctatccccaactaccactaccgagacgacggcctgaagatctgggcggccattgagagctttgtctcagaaatcgtgggctactattatcccagtgacgcatctgtgcagcaggattcggagctgcaggcctggactggcgagatttttgctcaggcgttcctgggccgggaaagctcaggtttcccaagccggctgtgcaccccaggagagatggtgaagttcctcactgcaatcatcttcaattgctctgcccagcacgctgctgtcaacagtgggcagcatgactttggggcctggatgcccaatgctccatcatccatgaggcagcccccaccccagaccaaggggaccaccaccctgaagacttacctagacaccctccctgaagtgaacatcagctgtaacaacctcctcctcttctggttggttagccaagaacccaaggaccagaggcccctgggcacctacccagatgagcacttcacagaggaggccccgaggcggagcatcgccgccttccagagccgcctggcccagatctcaagggacatccaggagcggaaccagggtctggcactgccctacacctacctggaccctcccctcattgagaacagcgtctccatctaa

SEQ ID NO: 804 - DNA, 918 bp, Homo sapiens
  CDS (195)..(620)
gcacacgggagaggagaagagggagacccgccgcctccctccctccctagctgacttgctccctcccgggctgcggctgctgcaaaagccagcagcggcagcgggagctgtccggaggccggcgtcgagggtttgccgctgtctctgctattccatcctccccataggggctctctcccctctcccatctcaagatggcagccagcagctctgagatctctgagatgaagggggttgaggagagtcccaaggttccaggcgaagggcctggccattctgaagctgaaactggccctccccaggtcctagcaggggtaccagaccagccagaggccccgcagccaggtccaaacaccactgcggcccctgtggactcagggcccaaggctgggctggctccagaaaccacagagaccccggctggggcctcagaaacagcccaggccacagacctcagcttaagcccaggaggggaatcaaaggccaactgcagccccgaagacccatgccaagaaacagtgtccaaaccagaagtgagcaaagaggccactgcagaccaggggtccacgctgcgagtctgcagcccagctgaaccagaccagagcctgatcccaaccgcatgacacagggaacagaattcacaagccataaaccgcagaggcgaagaccattgcagcaagaagctaccctacccaacagagagcaacaaaccaatacgactactagaatgacaagagtacagcgagcagcagagagatagcggcgacaacgcaaaggacgagaggagaaaagacagacggaaacacatagagaagacacaccaacagaccatacgcagacaaagagaacacacaaagaacaaggcacgaagagagagggcacacaaccaccagcgaccaccgagaacgacccagcagc

SEQ ID NO: 805 - DNA, 986 bp, Homo sapiens
  CDS (284)..(853)
atcgtggagggggaggtgtgtcctctctccccatgatcggctgcagttcccattttgtcttagatgttatacctggggtgggggcacctcacactgccccagaggatgcccctgagcaggaatcgcgggggtggagaggagcgaaggtgccccccttggagcccttttggagctccggctgcagcccacactcctgctcagaagtgcgcctccgttggggatccaggtccaaggcctgtcaccgtcccgcccacaggtgtcccgacccaggctaagcttgagcatggctgagcaggagcccacagccgagcagctggcccagattgcagcggagaacgaggaggatgagcactcggtcaactacaagcccccggcccagaagagcatccaggagatccaggagctggacaaggacgacgagagcctgcgaaagtacaaggaggccctgctgggccgcgtggccgtttccgcagaccccaacgtccccaacgtcgtggtgactggcctgaccctggtgtgcagctcggccccgggccccctggagctggacctgacgggcgacctggagagcttcaagaagcagtcgtttgtgctgaaggagggtgtggagtaccggataaaaatctctttccgggttaaccgagagatagtgtccggcatgaagtacatccagcatacgtacaggaaaggcgtcaagattgacaagactgactacatggtaggcagctatgggccccgggccgaggagtacgagttcctggcgcctgttcccccaggctttcagtgccaccacccccggcaggccttccctgacccagccaggaacaaacaagggaccaagtgcacacattgctgagagccgtctcctgtgcctcccccgccccatccccggtcttcgtgttgtgtctgccaggctcaggcagaggcgcctgtccctgcttcttttctgaccgggaaataaatgcccctgaaggaaaaaaaaaaaa

SEQ ID NO: 806 - DNA, 1749 bp, Homo sapiens
  CDS (477)..(887)
ggcttgcccttgaaggaactcaacattgtccttgcttctgtgcttgggaagacccacaggcccctaagggcgggggggggtccttgtttggtttcaggagcagcaggtgcaaaggccctggggtgggaggggtgagatgtgaggccacagcagcgggtgagggccaggctgcagagggttttggggaccatgaaggtgggcccttcagagatcaggcagggtcaggaaaggcagtagggaggcccaagacagcagacactgtggttgcttccatctggaagatgggcagctgcaggagcctggctgttcagggtcacacttctctccctgtcccggccccatctgctgggtgtccttccttggagcccttgacagcacctgtgcccctcctctccatcccctgaaccttggtggttgtgccccccctcggggcccaacaatctcattagggtggcactgagacgcctaatcagctcatgaagcagcgagataaaggccggggctggcaccctgcggagggaggcccagcactcacagcacagccccctgagacccgccctgcacttgaccgcagcaggagggagtccaggagccaaggttgccgcggtgtctccgtcagcctcaccatgaacctggaaccgcccaaggctgagttccggtcagccaccagggtggccgggggacctgtcacccccaggaaagggccccctaaatttaagcagcgacagaccaggcagttcaagagcaagcccccaaagaaaggcgttcaagggtttggggacgacatccctggaatggaaggcctgggaacagacatcacagtcatctgcccttgggaggccttcaaccacctggagctgcacgagctggcccaatatggcatcatctagcacgaggccctgctgaagtccagaccctccccctcctgcccactgtgctctaaaccctgctcaggattcctgttgaggagatgcctccctagcccagatggcacctggacaccaggatgggactgcaacctcaggtctccccctacatattaataccagtcaccaggagcccaccacctccctctaggatgccccctcaggggctggccaggccctgctcaacatctggagacacaggcccacccctcagtcctgcccacagagaggcttggtcggtctccactcccagggagaacgggaagtggaccccagcccgggagcctgctggaccccagatcgtcccctcctcccagctggaaagctagggcaggtctccccagagtgcttctgcaccccagccccctgtcctgcctgtaaggggatacagagaagctccccgtctctgcatcccttcccaggggggtgcccttagtttggacatgctgggtagcaggactccagggcgtgcacggtgagcagatgaggccccaagctcatcacaccagggggccatccttctcaatacagcccgcccttgcagtccctatttcaaaataaaattagtgtgtccttgcctgtctgtggcatatttgtgcatgggacagggcctgtggtggggtcacttgagttgagccggagcacatgggggaaggggtgggcagtggggcaggaggggctggcctgcctgagtgggaagcacgcccttgggctcacactctcactgagccttgctggtggccccaagacacgcaatgtcaggccatggctgggtcaaggcagaaggccttggtgcacacccaggggccatagtcaacgaagc

SEQ ID NO: 807 - DNA, 2093 bp, Homo sapiens
  CDS (1340)..(1705)
cttggcgaaagtaaaagggataattaactggctcttagcttatgtgcagagttccaagccccaaagttaatctagaaccactcgataacaccaataaaaatatttatttcacatctgttatatatctggaaaatgttctaagcatcttacacatatttctcattaaatccacaggtgaccattgtgaggtagatattttgttctaattttccagatgaggaagctgagaccctaaaaggttaggtgacaggttatacaacttggagtgtgggaggaggagagaggaacctgaacagggcaagttggggatctgacttttgtttgggtagatgtaggcacattgtatttttggcttagatgctttattcatcatggctgaaggtaataccatttactcactcaccgaaaattgtttacaataatctagatgaatttgctgtctttggacatctgtcttttgactggaccccagtatatagtctgtggaagctcacttaaggagagagctcctttttgtttggttagagaaattttctgtcctaaaagtagaaatagccccttctaggtaaggatggagcatttgatcatactggtttcattatattcctctaacagttggaaccgattgtttttgagtacttgtttcaaacttctgagtattttccttctggaaaatagctcagtgtttaaaatttacatgaacttaaaaggttaatttttttttaaagaatgtttgaggagcaatcaattctgattttgtcttatggatagaaatagaattagccattttcctcaagaaaagtgattcttctgaatcttagcttttcagtaatgagaactggactgtttccacttgacctctatttcctgttagtgggaaaccgcttcccagaggtgctgtgtgaaagattgctggggaaagggtttctagatcccagcataacaagttcaagagtccagcgatattgtcattagaataatggtcttcattaagtactagttttcataatcctgaagcttcattttcaccaatttgaaaggcagctagggaggagaagactatgcagggaaggaggaaaactctggagtgcatcacagagaccttgagtgagttaaggcagggaagaagcagatttgctatccactgaatgaaaataagaagaattccattgtccaaggtcagagcaagaacacaaaggttttagtttacttagttaattccttaggtttggacattacaggagacatgggggtgaccatagcaatttagctgataaatgtatcagaaactctttcatcattttctgtcccctcctatcttaggctgaccggttccctgatgtgttacctgcttctgctactgatccaaactgcagaacttctcattcatccccaaggcctccaggcagtatccaatggggaatcagctctaaaaggaaccagaccaacgttttccagccccttcattctggtgactgaggggaggaaagaatgggagggggtattcttgtctagtggatggaaaggaaacacactgtcaaattactatatctccttggttttctattacagtagaattctccagccatatttttattgtctatgggggaagttggagatggtgaccttgattagaagtgtctggagggggataaatggaggggataagattcagttggttttggaaaatgttaaagtcttaaaataatgcgtccatctgaagaattttttctaaaaccagagtttataaaaatatcactgatacagcctgccccctcatttccctgccacaggagatgtcttggactagagacacttgtttaataatagcttgtctctgatattcccagtagcttccctctgtgtgaggaaaggatagaaatgttcaggacatcatcatacaggctcctcatctacaaagttccagtagcagtgacgcctacacggaagacttggaactgcaaacaggctggggtcacctcagtgacatctgacgctgtccaaccagaagttcgatttttgttctgggggtgaaggaggaaacagactgtactaaaggactaaaataatttgtctatactaaaaaaaaaaaa

SEQ ID NO: 808 - DNA, 2979 bp, Homo sapiens
  CDS (271)..(1566)
aaggatccttaattaaattaatcccccccccccctttccctccctctcggcttttccacagtgggtcggaccaatcgcgcccgctccgacgtgtccaggtccgcggccccgggagcttggcgcggcccggcctggatgcgctgggcggagggtgcaggggagggcacggcgccgcttgcttggcctgcgcacccggacctagaagccgggacgagccggggcagagccaggcgcgcggaagtctgaaggtgccctccagacacggccccgatgactgaactacagcaagatgtggaagacacaaagcctgcgaaagtgctcgggaagagggagagcaaacttggctcagcccactcagaggctgagaatggtgtggaggagaaaaagaaagcctgcaggtcgccaacagcccaatcccctaccccatctgtggaggcggactccccagaccagaagaaaatcattagcctatggtcaaaatccagttttgatggtgcctctttagcaagtgataagaacgactgtaaaacagaaagcaaaaatgaccctaagactgaaagaaaaaagtcttcatcttccagccagtacaaggccaatatgcactttcacaagttgtttcttagtgtcccaacggaggaaccactgaagcaaagctttacctgtgctctacaaaaaaaaatactataccaaggaaagctctttgtatcagaaaactggatttgttttcattccaaagtctttggaaaagacacaaagatctctattccagctttctcggtaaccctaataaagaaaaccaaaactgctcttctagtgccaaacgccctgatcatagcaacagtcacagacaggtacatatttgtctccttactctccagagattcaacttacaaactactaaaatctgtgtgtggacacttagaaaatacaagtgttggtaacagtcccaatccatcttctgctgaaaacagtttccgagcagaccgcccttcatctctgcctctggatttcaatgatgaattctcagatctggatggagtggttcaacgaagaaggcaagacatggaaggatatagcagttctggttctcaaactcctgaatctgagaactctcgagatttccatgcgacagaatcccaaacagttctgaatgtctccaagggagaagcaaagccaactcgggcagatgcccatgtgaacagagtacctgaaggaaaagccaagagtctccctgtacagggtctgtcagaaactgttggaatcttacataaagtcaagtctcagaaatgtccgatgcttcaccatattcttatattctatgcaattgttgtctgtgcactaatcatctcgaccttctacatgagatacagaattaatactctggaggagcagctggggttactaacctccattgtggacacccataatactgaacaggcagcaccatctggcctgaggtcacaagtacaattcaatgtggaggttctctgtcaagagcttacagctaacatagtgaaattagaaaagatacaaaataacttacagaagttgcttgagaatggtgactgatcgaccagattgcttgggccatcggaatacctcatgtttccctttgaagaaggtgcttcccgaggcgttttgtttgagtgcaccctgctggtcagaggtgcaagcagatgagaatccagacattgcatgtggaggtctccagctcaggaaagtggggagggaaataattttggttcttgtgcaataaaagttgaccttgactctctgaggaagattttgctgcttttgcctgaagaaaacagacccatctctggaggtctcaggaagggcccagcgaacacactctcttggataattaccacgatggcgtcagcaaacactccaccctgtgcctttttagtccttcccgccctcctgcctctcccttacacccctcttaacgactttcaaactaaaggatacatcatatactgacaaactcaatgtggtcctttcaagaattagccatgagtctcaaaaaggcaataaatggctctaagtggacaggtttgcttcaaacaagtaacatctacattttgtcttttttttttcagttctcctgttatgttctggttgaaatcacctgtgtgtcttaatttctcaattcctttttggcaagaatatcaagcaaggtgaatttaacattatgtttatgttttgttttgttgctgtaactaatagttaattggactgattcttacccagccctggtcaagaatctgtgaggcatgtgactgaagtactaaattaaacttattttgaaaccaaacctaatttttaagccaaaaggtgtaatagtgatttaatacaggatgaaaaacactgaatttttaagactgtaggtggactatgttagtagttttcaagcaggatgtctgtattcagcattcaataatgctaaaatccctttcagcatgaaatttgtatgtttttatcctttgctgactaaaataaaataactggtggtttgctaactatttaccatatgggttggctggtttttattaataattgtttagggtatcataagatctgtaagtacaaaggatattctgtttctatctgcaatgcatttgataatcatttctatgaaatgtattttatttaatcagataagctaataagcgaattggttacatcgtttgtatctgttggcctagtggacagctgtgcctggtgcacctctggcttttaataaatactcattggttgaaacaccctgctaacactgtgttttgtcagttcgtaaattcctttaaccaagacttaactatgctttttaactctttttccacctgccatctactactaccaactcacttatacttccttcctcccaagtaatcatttcaaaactaaaaaaggatttaagttcttgggttacaacggtttaaaggaaagaaaatgaactttgaagtcaaaaaaaaaaaa

SEQ ID NO: 809 - DNA, 2174 bp, Homo sapiens
  CDS (586)..(867)
ctgaggaattcggacgaggaggactgctcgcgggcgggcggcgggcgggcgcgggtttgatttctgagccctataaaagcccatcctccgatggctgtgacaatgtggtcgtaaacccgtccggggccggccaatttgcatatttggaatgcgccgctataaacccggctggggttttgcagcgatttcttagatgtaaaaatgagatctcaatagcagcgggctgggcacatcctctcctctctccttctctctctgcccggagctggtttccgtctctcggctcggggctggaactccggcccaacctaggcgcgcagccgccacgagatggcgcacttccgatcaatgtcaaagccgccggggagccgggaaccccagcatgattcttggcctttgttcgcttctgatactaagagcagcacggtacattatttcacttgtcccgctccccttcataacagaaaaaggggactcaccctcaagaagtgattggtatggtaatttaaagcaacgcgcattcgctaggcctcgcgagcgtcgccgcgcggagaagccagctgtcccttggcagtgatttcggaaatgtgtcaaggcaattccaaaggtgaaaacgcagccaactggctcacggcaaagagtggtcggaagaagcgctgcccctacacgaagcaccagacactggagctggagaaggagtttctgttcaatatgtaccttactcgagagcggcgcctagagattagccgcagcgtccacctcacggacagacaagtgaaaatctggtttcagaaccgcaggatgaaactgaagaaaatgaatcgagaaaaccggatccgggagctcacagccaactttaatttttcctgatgaatctccaggcgacgcggttttttcacttcccgagcgctggtcccctccctctgtcttcaggctctgcccaggaactcgcacctgtgctggagccctgttcctccctcccacactcgccatctcctgggccgttacatctgtgcagggctggtttgttctgactttttgtttctttgtgtttgcttggtgctggtttatttgttgttttctgggggaaaaagccatatcatgctaaaattctatagagatagatattgtcctaagtgtcaagtcctgactgggctgggtttgctgtcttggggtcccactgctcgaaatggcccctgtcttcggccgagctggtttcctgcccagcctggggcaaacctagccggaaggccgaggtcccattgttggcgctgaggtgtctggcctgaggtcaatggtgcaaaggagccgccaccgggcatgtctgcctggagtgctgtgctgtgtttaatcaggggatacaggcccctgggtttcttttttctttcttcctttcttccttggccaagagaagggcttacaggcatggacatgcaggttggcaaacgggcttgactttggctgatttaaaaagtgagaaagaaagtaaaaaaggttaatttttccttcctctgtaagatatcccagctttaaaaaaaaaaaaaaagaattaccaagagaaggggacttctcttccagtttctgtaaggtcttacattgcctgactaaaatgtttcatttacctctaaatttccatatccttctggctgtagataaataatgtagttttgtttatgcatttggaattagtggatttttttgtcattaaaattgttaccactggtaacatgtgacaagcacaccacaattctccctatcttgtgaagttgtttttttaaatcgccttgaacaaaaagttttttttttgtttgtttttgctttctgaaattcacagaagcctaggaggactggggtaagcggaataaactagagaagggagacattgtttggatttcctttatactgtgaagttacatgcataaaagggtcaaacctgtagatgcagaaaaagaaaaaaactataaatacaaatctgtataaatgtctattattatgaagaattgccaatcttgttttaagcaaatgcattctatcgttattataaatgttagttctagctctatttacttctaatcttaaatcagaataaattaatattgtattgctgctgtgcgtggaaaaagacgatgtttatgttcttatagaataaaagctgtggaatgaaaaaaaaaaaa

SEQ ID NO: 810 - DNA, 1509 bp, Homo sapiens
  CDS (292)..(807)
  misc_feature (1)...(1509): n = a,t,c or g
gcacatccacatagtatgccagtcgctgcaaaccaaaccgcgtgtgtccgctgggtctctgggcatgcagtttgctcccactgcgggaatggggtgggggcaggccgagcctgggctctgggggctttgctgggggagcttctggtcctgggggtacccacttgtgagggagtggggggacagctggaatagcgttgctcagtgcgtcctttgggcgctgttggggacaccctccctcgctctcccacaccactggcaccaggccccggacacccgctctgctgcaggagaatggctactcatcacacgctgtggatgggactggccctgctgggggtgctgggcgacctgcaggcagcaccggaggcccaggtctccgtgcagcccaacttccagcaggacaagttcctggggcgctggttcagcgcgggcctcgcctccaactcgagctggctccgggagaagaaggcggcgttgtccatgtgcaagtctgtggtggcccctgccacggatggtggcctcaacctgacctccaccttcctcaggacctacagctaccggagtccccactggggcagcacctactccgtgtcagtggtggagaccgactacgaccagtacgcgctgctgtacagccagggcagcaagggccctggcgaggacttccgcatggccaccctctacagccgaacccagacccccagggctgagttaaaggagaaattcaccgccttctgcaaggcccagggcttcacagaggataccattgtcttcctgccccaaaccgataagtgcatgacggaacaataggactccccagggctgaagctgggatcccggccagccaggtgacccccacgctctggatgtctctgctctgttccttccccgagcccctgccccggctccccgccaaagcaaccctgcccactcgggcttcatcctgcacacttaactcggtatgccacaccactggcaccaggccccggacacccgctctgctgcaggagaatggctactcatcacacgctgtggatgggactggccctgctgggggtgctgggcgacctgcaggcagcaccggaggcccaggtctccgtgcagcccaacttccagcaggacaagttcctggggcgctggttcagcgcgggcctcgcctccaactcgagctggctccgggagaagaaggcggcgttgtccatgtgcaagtctgtggtggcccctgccacggatggtggcctcaacctgacctccaccttcctcaggaaaaaccagtgtgagacccgaaccatgctgctgcagcccgcggggtccctcggctcctacagctaccggagtccccactggggcagcacctactccgtgtcagtggtggagaccgactacgaccagtacgcgctgctgtacagccagngcagcaagggccctggcgaggacttccgcatggccaccctctacagccgaacccagacccccagggctgagttaaaggagttcccgccttctgcg

SEQ ID NO: 811 - DNA, 841 bp, Homo sapiens
  CDS (20)..(808)
tttcgttgcagcatctgccatgagcatcggcctcctgtgctgtgcagccttgtctctcctgtgggcaggtccagtgaatgctggtgtcactcagaccccaaaattccaggtcctgaagacaggacagagcatgacactgcagtgtgcccaggatatgaaccatgaatacatgtcctggtatcgacaagacccaggcatggggctgaggctgattcattactcagttggtgctggtatcactgaccaaggagaagtccccaatggctacaatgtctccagatcaaccacagaggatttcccgctcaggctgctgtcggctgctccctcccagacatctgtgtacttctgtgccagcacctctttagggacagctcgcctgcgagtctatggctacaccttcggttcggggaccaggttaaccgttgtagaggacctgaacaaggtgttcccacccgaggtcgctgtgtttgagccatcagaagcagagatctcccacacccaaaaggccacactggtgtgcctggccacaggcttcttccccgaccacgtggagctgagctggtgggtgaatgggaaggaggtgcacagtggggtcagcacagacccgcagcccctcaaggagcagcccgccctcaatgactccagatactgcctgagcagccgcctgagggtctcggccaccttctggcagaacccccgcaaccacttccgctgtcaagtccagttctacgggctctcggagaatgacgagtggacccaggatagggccaaacccgtcacccagatcgtcaacgccgaagcctggggttgaacagactgaggctttacctgggtgtcctac

SEQ ID NO: 812 - DNA, 992 bp, Homo sapiens
  CDS (207)..(584)
gcacgcgcggcggggggcgtggggctgggcccagccggacgcgacctcagcctgcggcggctaactgccggtaggcgtctgtgtgcgccgccaagtcggtggggcggggacgcgaggtgtggatggggggtcgccttgacctctgcctcagccagtagcgcagtctcggcctcgccgttacggagatggtgccctgggtgcggacgatggggcagaagctgaagcagcggctgcgactggacgtgggacgcgagatctgccgccagtacccgctgttctgcttcctgctgctctgtctcagcgccgcctccctgcttcttaacaggtatattcatattttaatgatcttctggtcatttgttgctggagttgtcacattctactgctcactaggacctgattctctcttaccaaatatattcttcacaataaaatacaaacccaagcagttaggacttcaggaattatttcctcaaggtcatagctgtgctgtttgtggtaaagtgaaatgtaaacgacataggccttctttgctacttgaaaactaccagccatggctagacctgaaaaattcttccaaggtttgatgcatctctctcagaggtggatattccattcttattataaccaagaaactattaatagcagcaatgaagcatatagaactgatagttaaggcagacggcaagtacaacaatccgggtttttacaggccaaggggcttttagaaggaaattggccgagagcttcaggtggttggagaaagtggaagagaggaattggctatttaggagatttacggaagggttttcctttaatttgggctcctaaagaacgagaggggatttgtgacttattagggagagaatgggggggggggagccaccgttggatgagtgtccgagagggaaagtggtaattagaggagaggcctggaggaagagacggtgttgtcacttggaagggccaaagagtgtggagagagaaacttt

SEQ ID NO: 813 - DNA, 2024 bp, Homo sapiens
  CDS (39)..(1187)
agcccgagccggagcccgagcgccgggagcgagacctcatggcagcggtggcgcccgcgggccccggggactccgcctcggccgccctggacgagctgtcactgaatttcacgtacggggcaccaggcgccggcaacggctccctctcgggcgactggtaccgcaggaaccagattcacctttttggagttttgctggctattttaggaaacttggtgatcagtatttctctaaatattcagaaatattctcaccttcagctggcacaacaagagcacccaaggccatacttcaagagtgtgctgtggtggggtggtgtcctgctgatggccgtgggagagacggggaactttgcagcctatggatttgctcccattactctgatcgctccgttaggctgtgtgtctgttacaggtagtgccattatttctgttacatttctgaaagacaatttgagagcctcagacttactcggtacgacactggcatttgcaggaacatatttactggtgaactttgctccaaatataactcaggcaatctcagcaagaacagtacagtattaccttgtcggatggcagttcctgatctatgtgattttagaaatattaattttctgcattctcctgtatttctataaaagaaaaggaatgaagcatatggtgattctgctaaccctggtggcaattctagcctcattgactgttatttcagtaaaggccgtctcaggcatgatcactttttctgtgatggataaaatgcaactaacttaccccattttctatatcatgtttatcatcatgatagcatcttgtgttttccaagtcaagttcctgaatcaagccacgaaactctacaatacgacaacagtggtgccagttaatcatattttctttacaatcagtgccatcattgcaggtatcatattttatcaggaattccttggtgctccttttctcactgtatttatatatctttttgggtgttttctgtcattccttggtgtatttttggtcacaagaaatcgagaaaaggaacatctgcaacagtcttatattgattttggaaatattcctgggaaacaaatgttggacaaaatacaaccagattcacatagcttatcctatggaactttgcctgatggaagtgactcaacaaagagccaaagtggagagaagaaagaggtctaaatgctgagaaggatggctgttggcctgttattcgataccacctttttaaaaaattgcacatgttcaatttgtgtcagcagctcttttataagctgacatgtgctagcattcatttcagtcctttcccccacctcagcgtctatggacaatcggggacttcctaagctctgacagtctaatatttccatggaatgtgatttggagtgttccccacaccctggacctctccctagtgattatctagccagctacaccttactcagagcccggctgctctagcaggaatgttgcacagaaacatacatttgcggtttggccacaggtcgcataggtggcttctcccacgggtagtgtcagttgcttcactttaaaaagtcacttcagccccacaacctcactcccaaaagaaaggtttgagagcgctcattttttttctaagacaccttttataagcctccctataaaaatctcacctttcaagtactaagttagaattgcaagtcatcttttctgaaaactaatgctatcaaagtcctcctttgaaaattaagggtctctttaaaattagaatttataaatggcattcagtgatagtgtacaccaaaattaaaagaccttgactggtgggctttttacgtgtaaggaagaggaagtttaagaagtaggactctgcttgtttcagtagcccatgtactaaaataggaacaatgcagagattagcacagcccctgcacaaggctgacacataaattcatgaagcgttagagacaaaaagtaggactaatgtttgtttattttttaataaaaatctagaatggtaaaaaaaaaaaaaaa

SEQ ID NO: 814 - DNA, 877 bp, Homo sapiens
  CDS (259)..(870)
tcacactatccgttcagctgtttctggatggtgcagcataaagtatactgtgggtaacagagtatctacagttacctgcccattgccacacaccttgtgctccatatggggttgatcagtcaaaggtgaagttaggtaggattccacactgccacaacaagttctcttgggcccccatataacggtgctggctgaggcagagggactcagggccactctcttgctggcaggtcggatgttcagcagtggtgtcctggtatgccagaacctccaccctctgacgccatggtcagctcctgctgtggctctgtctgctctgaccagagctgtggtcaaggtctcggccaggagagctgctgccgccccagctgctgccagaccacctgctgcaggaccacctgctgccgccccagctgctgcatttccagttgctgcaggccttcctgctgtatctccagctgctgcaaacccagctgctgcaggaccacctgctgccgccccagctgctgcatttccagttgctgcaggccttcctgctgtatctccagctgctgcaaacccagctgctgcaggaccacctgctgccgccccagctgctgcatttctagttgctgcaggccttcctgctgtatctctagctgttgcaaacccagctgctgccagaccacctgctgccgccccagctgctgtatctccagctgctacaggccccagtgctgccagccctcctgctgccgcccggcttgctgcatttctagttgctgtcatcccagctgctgtgtgtccagctgccgctgccctttcagctgcccgaccacctgctgtagaacaacctgcttccaccccatctgctgcggcagttcttgctgctgagtga

SEQ ID NO: 815 - DNA, 1699 bp, Homo sapiens
  CDS (109)..(1476)
ggaaggaagtgagtgccctgtccttcctccctgccatgagattccaggaccggacctggcaagtgccctatcccagccagtgttcctggggctcttccaggcagggctatgttccccaggccaggggcattgtcctggacagtcaggaggcatacccctcgccaggtggaaccaccctgtgtatgcatgaccctgacaagcaggcgccaggacagtcaggaggccaggcccgagtgccaggcatggacggggacgctgctgctgggcacatgccttctgtactgcgcccgctccagcatgcccatctgcaccgtctccatgagccaggacttcggctggaacaagaaggaggccggcatcgtgctcagcagcttcttctggggctactgcctgacacaggttgtgggcggccacctcggggatcggattgggggtgagaaggtcatcctgctgtcagcctctgcctggggctccatcacggccgtcaccccactgctcgcccacctgagcagtgcccacctggccttcatgaccttctcacgcatcctcatgggcttgctccaaggggtttacttccctgccctgaccagcctgctgtcgcagaaggtgcgggagagtgagcgagccttcacctacagcatcgtgggcgccggctcccagtttgggacgctgctgaccggggcggtgggctccctgctcctggaatggtacggctggcagagcatcttctatttctccggcggcctcaccttgctttgggtgtggtacgtgtacaggtacctgctgagtgaaaaagatctcatcctggccttgggtgtcctggcccaaagccggccggtgtccaggcacaacagagtcccctggagacggctcttccggaagcctgctgtctgggcagccgtcgtctcccagctctctgcagcctgctccttcttcatcctcctctcctggctgcccaccttcttcgaggagaccttccccgacgccaagggctggatcttcaacgtggttccttggttggtggcgattccggccagtctattcagcgggtttctctctgatcatctcatcaatcagggttacagagccatcacggtgcggaagctcatgcagggcatgggccttggcctctccagcgtctttgctctgtgcctgggccacacctccagcttctgtgagtctgtggtctttgcatcagcctccatcggcctccagaccttcaaccacagtggcatttctgttaacatccaggacttggccccgtcctgcgccggctttctgtttggtgtggccaacacagccggggccttggcaggtgtcgtgggtgtgtgtctaggcggctacttgatggagaccacgggctcctggacttgcctgttcaaccttgtggccatcatcagcaacctggggctgtgcaccttcctggtgtttggacaggctcagagggtggacctgagctctacccatgaggacctctagctcccaaccccacagcctctccaaggacccaggcgccagcagccccaggacacaggggactcagtgtgtgggacttggtcactccatgtcagacacacgagcagagaggaacacaaaccactgtggagcctgaagctccttaagaagagtccacaacagctggtgcgagggtgcgttatactcccgactccactcaggtggactcgagactcttgggccg

SEQ ID NO: 816 - DNA, 513 bp, Homo sapiens
  CDS (1)..(411)
atgctccaaaagaagatagaagaaaaagacttaaaggttgatgtgatcgtgacactgggaggccttgctgggcgttttgaccagattatggcatctgtgaataccttgttccaagcgactcacatcactccttttccaattataataatccaagaggaatcgctgatctacctgctccaaccaggaaagcacaggttgcatgtagacactggaatggagggtgattggtgtggccttattcctgttggacagccttgtatgcaggttacaaccacaggcctcaagtggaacctcacaaatgatgtgcttgcttttggaacattggtcagtacttccaatacctacgacgggtctggtgttgtgactgtggaaactgaccacccactcctctggaccatggccatcaaaagctaacctgttgactggtatccataagtgtgcctctgccttatctcatatttcaacagttcattgctcatcaagaacgattcacctggggttgtcagaatttag

SEQ ID NO: 817 - DNA, 2223 bp, Homo sapiens
  CDS (50)..(2149)
tctcgggtcgacgatttcgtcaggcctgggccccctcagggaggaagcgatgaagccaggggcagcctccagtcccttgcagcaggtccccgccccgccactgcctgcgaagaagaaccttcccactgcccctcccagacgccgcgtttccgagagggtgtccttagaagaccaaagtccggggatggcggcagagggggaccagctcagcctgcctccccaagggacctcagacggccctgaggacacaccccgggagagcacggagcaaggccaggacacagaggtgaaagccagcgatcctcacagcatgccagagctgcccaggacagccaaacaacccccagtcccgccccccaggaaaaaacggatctctcgacaactggcctcgaccctcccagctcccttagagaacgctgagctctgcacacaggcgatggccttggagacacccacgccgggtccacccagagagggccaaagccctgcttctcaggctgggactcagcaccctcctgcccaggccactgcccattcccagagctctccagagttcaagggctccctggcctccctctcagacagcttgggggtgtctgtcatggccaccgaccaggactcctactccaccagcagcacggaggaggagctggagcagttcagcagccccagcgtgaagaagaagccctccatgatcctgggcaaggctcggcaccggctgagctttgccagtttcagcagcatgttccacgctttcctctccaacaaccgcaagctgtacaagaaggtggtggagctggcgcaggacaagggctcgtactttggcagcctggtgcaggactacaaggtgtacagcctggagatgatggcgcgccagacctccagcacggagatgctgcaggagattcgcaccatgatgacccagctcaagagctacctgctgcagagcaccgagctcaaggccctggtggaccccgccctgcactccgaggaggagctcgaagcaattgtagagtctgccttgtacaaatgtgtcctgaagcccctgaaggaagccatcaactcatgcctgcatcagatccacagcaaggatggttcgctgcagcagctcaaggagaaccagttagtgatcctggccaccaccaccactgacctaggtgtgaccaccagcgtgccggaggtgcccatgatggagaagatcctgcagaagttcaccagcatgcacaaggcctactcacctgagaagaagatctccatcctgctcaagacctgcaaactcatctacgactccatggccctcggcaacccagggaagccctatggggcggatgacttcctgcctgtgctcatgtatgtgctggcccgcagcaacctcacggagatgcttctcaatgtggagtacatgatggagctcatggaccccgccctgcagctgggggagggttcctactatctgaccaccacctacggggccctggagcacatcaagagctacgacaagatcacggtgacccggcagctgagtgtggaggtgcaggactccatccaccgctgggagcgccggcgtactctcaacaaggcccgggcctcccgctcctccgtacaggacttcatctgcgtgtcgtacctggagcccgagcagcaggcgcggacgctggcgtcgcgggcggacacccaggcccaggcgctgtgcgcgcagtgcgcggagaagttcgcggtggagcggccgcaggcgcaccggctgttcgtgctggtggacgggcgctgcttccagctggcggacgacgcgctgccgcactgcatcaagggctacctgctgcgcagcgagcccaagcgcgacttccactttgtctaccggcccctggacggtggtggcggcggcggcggcgggagcccgccctgcctggtggtgcgggagcccaacttcctgtcagcgctttgcgaggccctgagaaccagcgcagagctcatgtggagcaccagcatgagtggccctgagctgggcatccagtttgctgggaaatgctggcttccgggaaagctgtaccagaacctcctctttgcagcccacacagccctaagccagcaggaaactgaaatgtttgtcttcagggtcagaaaacctactcagcagtacagtgggaagaactgaactagagccagaagacctgggctccagcccagctgcaaaccctgtgcacgtccttaatagcttcatgcctc

SEQ ID NO: 818 - DNA, 3280 bp, Homo sapiens
  CDS (5)..(2164)
gcagatgcaccccaagtcaataatcacattcagagagataaatggggagtacactggggctgtggattttcccaggctaggagtccgtgcttctgaggaaacagcgctcagagagctgaagatgagcaaggagctggcagcaatggggcctggagcttcaggggacggggtcaggactgagacagctccacacatagcactggactccagagttggtctgcacgcctacgacatcagcgtggtggtcatctactttgtcttcgtcattgctgtggggatctggtcgtccatccgtgcaagtcgagggaccattggcggctatttcctggccgggaggtccatgagctggtggccaattggagcatctctgatgtccagcaatgtgggcagtggcttgttcatcggcctggctgggacaggggctgccggaggccttgccgtaggtggcttcgagtggaacgcaacctggctgctcctggcccttggctgggtcttcgtccctgtgtacatcgcagcaggtgtggtcacaatgccgcagtatctgaagaagcgatttgggggccagaggatccaggtgtacatgtctgtcctgtctctcatcctctacatcttcaccaagatctcgactgacatcttctctggagccctcttcatccagatggcattgggctggaacctgtacctctccacagggatcctgctggtggtgactgccgtctacaccattgcaggtggcctcatggccgtgatctacacagatgctctgcagacggtgatcatggtagggggagccctggtcctcatgtttctgggctttcaggacgtgggctggtacccaggcctggagcagcggtacaggcaggccatccctaatgtcacagtccccaacaccacctgtcacctcccacggcccgatgctttccacattcttcgggaccctgtgagcggggacatcccttggccaggtctcattttcgggctcacagtgctggccacctggtgttggtgcacagaccaggtcattgtgcagcggtctctctcggccaagagtctgtctcatgccaagggaggctccgtgctggggggctacctgaagatcctccccatgttcttcatcgtcatgcctggcatgatcagccgggccctgttcccagacgaggtgggctgcgtggaccctgatgtctgccaaagaatctgtggggcccgagtgggatgttccaacattgcctaccctaagttggtcatggccctcatgcctgttggtctgcgggggctgatgattgccgtgatcatggccgctctcatgagctcactcacctccatcttcaacagcagcagcaccctgttcaccattgatgtgtggcagcgcttccgcaggaagtcaacagagcaggagctgatggtggtgggcagagtgtttgtggtgttcctggttgtcatcagcatcctctggatccccatcatccaaagctccaacagtgggcagctcttcgactacatccaggctgtcaccagttacctggccccacccatcaccgctctcttcctgctggccatcttctgcaagagggtcacagagcccggagctttctggggcctcgtgtttggcctgggagtggggcttctgcgtatgatcctggagttctcatacccagcgccagcctgtggggaggtggaccggaggccagcagtgctgaaggacttccactacctgtactttgcaatcctcctctgcgggctcactgccatcgtcattgtcattgtcagcctctgtacaactcccatccctgaggaacagctcacacgcctcacatggtggactcggaactgccccctctctgagctggagaaggaggcccacgagagcacaccggagatatccgagaggccagccggggagtgccctgcaggaggtggagcggcagagaactcgagcctgggccaggagcagcctgaagccccaagcaggtcctggggaaagttgctctggagctggttctgtgggctctctggaacaccggagcaggccctgagcccagcagagaaggctgcgctagaacagaagctgacaagcattgaggaggagccactctggagacatgtctgcaacatcaatgctgtccttttgctggccatcaacatcttcctctggggctattttgcgtgattccacagacctggcttcagtgtagacagattaaacaaagcccaagcctgtcagccacagaaacaggctctcctcttactttgctgtctaaactggagatcacagaagtcaagactgcaagctcccctgaagagaatccaactcaacctgcacacttgacaagtggagaaacagaagctcagagagagcactgggtttgttcaggaccacccagaaggtgtcacacggggtttccccactctttctgatatattgccttacagacctacctcaaacacactgtttccaccctcttcttgaatgtattcagtagcctttactgaatgtgtgtcttgagagtagaaaaatggaggatacaagaaaaggagcaggaagaaatttgcaaaaatccaagagcacctttgctcccccttatcctccttcctcttcccctttctagttcccctacctctctatctttctattctcaccaataatctctttgttgcatgaatttacccaggagagttctatatttccattggtggctccacagtggtggctgtcagacccgaaggggtggggagccaagggtggactttaagcatggtgacagatggtattttgggcagaaagctcttagacaatggactatccaaagcactatttaaattctgcctcttcctactctctaacccaaatatgcacaaactctctatggccttgagaagcagttggagagacatgacttgttaaaacctcaaggaatcaagacatgttactctgtatttaagggtaagccccacagcgggcagcacaaacagcctgggagccactgtgcctgtgcttctctgtccttctccctttgcttgccatgaatccgcataccttggaatacactgtgaccccagttaagtgtcccttcgccaggaagctgccgcaacgtccagacctgggtcaagttcccactcctgctcccatagccttgacctgcttctgtcacagcactgatcacactgagatggaagactccagggggcaaggaccaagggccatatcccaagtgactttgtacccagaaaataacagctgttcaataaatgtgtattgagttaattagttaaaaaaaaaaaa

SEQ ID NO: 819 - DNA, 2646 bp, Homo sapiens
  CDS (106)..(2217)
ggctaggccggctcgagactcccgggcgccgaggcgctgccgcccgcctcgccgccccacgccgaaggaccacgcgcccgccgccgccagcctctcagcgctcccatgatcgcccggtgccttttggctgtgcgaagcctccgcagagttggtggttccaggattttactcagaatgacgttaggaagagaagtgatgtctcctcttcaggcaatgtcttcctatactgtggctggcagaaatgttttaagatgggatctttcaccagagcaaattaaaacaagaactgaggagctcattgtgcagaccaaacaggtgtacgatgctgttggaatgctcggtattgaggaagtaacttacgagaactgtctgcaggcactggcagatgtagaagtaaagtatatagtggaaaggaccatgctagactttccccagcatgtatcctctgacaaagaagtacgagcagcaagtacagaagcagacaaaagactttctcgttttgatattgagatgagcatgagaggagatatatttgagagaattgttcatttacaggaaacctgtgatctggggaagataaaacctgaggccagacgatacttggaaaagtcaattaaaatggggaaaagaaatgggctccatcttcctgaacaagtacagaatgaaatcaaatcaatgaagaaaagaatgagtgagctatgtattgattttaacaaaaacctcaatgaggatgataccttccttgtattttccaaggctgaacttggtgctcttcctgatgatttcattgacagtttaaaaaagacagatgatgacaagtataaaattaccttaaaatatccacactatttccctgtcatgaaaaaatgttgtatccctgaaaccagaagaaggatggaaatggcttttaatacaaggtgcaaagaggaaaacaccataattttgcagcagctactcccactgcgaaccaaggtggccaaactactcggttatagcacacatgctgacttcgtccttgaaatgaacactgcaaagagcacaagccgcgtaacagcctttctagatgatttaagccagaagttaaaacccttgggtgaagcagaacgagagtttattttgaatttgaagaaaaaggaatgcaaagacaggggttttgaatatgatgggaaaatcaatgcctgggatctatattactacatgactcagacagaggaactcaagtattccatagaccaagagttcctcaaggaatacttcccaattgaggtggtcactgaaggcttgctgaacacctaccaggagttgttgggactttcatttgaacaaatgacagatgctcatgtttggaacaagagtgttacactttatactgtgaaggataaagctacaggagaagtattgggacagttctatttggacctctatccaagggaaggaaaatacaatcatgcggcctgcttcggtctccagcctggctgccttctgcctgatggaagccggatgatggcagtggctgccctcgtggtgaacttctcacagccagtggcaggtcgtccctctctcctgagacacgacgaggtgaggacttactttcatgagtttggtcacgtgatgcatcagatttgtgcacagactgattttgcacgatttagcggaacaaatgtggaaactgactttgtagaggtgccatcgcaaatgcttgaaaattgggtgtgggacgtcgattccctccgaagattgtcaaaacattataaagatggaagccctattgcagacgatctgcttgaaaaacttgatgcttctaggctggtcaacacaggtcttctgaccctgcgccagattgttttgagcaaagttgatcagtctcttcataccaacacatcgctggatgctgcaagtgaatatgccaaatactgctcagaaatattaggagttgcagctactccaggcacaaatatgccagctacctttggacatttggcagggggatacgatggccaatattatggatatctttggagtgaagtattttccatggatatgttttacagctgttttaaaaaagaagggataatgaatccggaggttggaatgaaatacagaaacctaatcctgaaacctgggggatctctggacggcatggacatgctccacaatttcttgaaacgtgagccaaaccaaaaagcgttcctaatgagtagaggcctgcatgctccgtgaactggggatctttggtagccgtccatgtctggaggacaagtcgacatcaccatgtgttactggcctggaaactgaagggagttttgcaagtgaaaatttagatttctattgacatccttttgttttctaattttaaaaattataaagatgtaaatggaattataaatactgtgacctaagaaaagacccactagaaagtaattgtactataaaatttcataaaactggatttgatttctttttatgaaagtttcatatgaatgtaacttgattttttactattataatctagataatatgatataagagggctaagaatttttaaattgaatcatatatatgatataatttgatccttcttgtatcttgaagttttgtacttgggatttctggactgataaatgaatcatcacaaaaaaaaaaaaa

SEQ ID NO: 820 - DNA, 4149 bp, Homo sapiens
  CDS (43)..(3894)
agcaggtctcgagcctccatccatcgggggagcatccccgcgatgtcctatgcccccttcagagatgtacggggaccctctatgcaccgaacccaatacgttcattccccgtatgatcgtcctggttggaaccctcggttctgcatcatctcggggaaccagctgctcatgctggatgaggatgagatacaccccctactgatccgggaccggaggagcgagtccagtcgcaacaaactgctgagacgcacagtctccgtgccggtggaggggcggccccacggcgagcatgaataccacttgggtcgctcgaggaggaagagtgtcccaggggggaagcagtacagcatggagggtgcccctgctgcgcccttccggccctcgcaaggcttcctgagccgacggctaaaaagctccatcaaacgaacgaagtcacaacccaaacttgaccggaccagcagctttcgccagatcctgcctcgcttccgaagtgctgaccatgaccgggcccggctgatgcaaagctttaaggagtcacactctcatgagtccttgctgagtcctagcagtgcagctgaggcattggagctcaacttggatgaagattccattatcaagccagtgcacagctccatcctgggccaggagttctgttttgaggtaacaacttcatcaggaacaaaatgctttgcctgtcggtctgcggccgaaagagacaaatggattgagaatctgcagcgggcagtaaagcccaacaaggacaacagccgccgggtagacaatgtgctaaagctgtggatcatagaggcccgggagctgccccccaagaagcggtactactgtgagctctgcctggatgacatgctgtatgcacgcaccacctccaagccccgctctgcctctggggacaccgtcttctggggcgagcacttcgagtttaacaacctgccggctgtccgtgccctgcggctgcatctgtaccgtgactcagacaaaaagcgcaagaaggacaaggcaggctatgtcggcctggtgactgtgccagtggccaccctggctgggcgccacttcacagagcagtggtaccctgtaaccctgccaacaggcagtgggggatctgggggcatgggttcgggagggggagggggctcggggggtggctcagggggcaagggcaaaggaggttgcccggctgtgcggctgaaagcacgttaccagacaatgagcatcttgcccatggagctatataaagagtttgcagagtatgtcaccaaccattatcggatgctgtgtgcagtcttggagcccgccctgaatgtcaaaggcaaggaggaggttgccagtgcactagttcacatcctgcagagtacaggcaaggccaaggacttcctttcagacatggccatgtctgaggtagaccggttcatggaacgggagcacctcatattccgcgagaacacgcttgccactaaagccatagaagagtatatgagactgattggtcagaaatacctcaaggatgccattggagaattcatccgtgctctgtatgaatctgaggaaaactgcgaggtagaccctatcaagtgcacagcatccagtttggcagagcaccaggccaacctgcgaatgtgctgtgagttggccctgtgcaaggtggtcaactcccactgcgtgttcccgagggagctgaaggaggtgtttgcttcgtggcggctgcgctgcgcagagcgaggccgggaggacatcgcagacaggcttatcagcgcctcactcttcctgcgcttcctctgcccagcgattatgtcgcccagtctctttgggcttatgcaggagtacccagatgagcagacctcacgaaccctcaccctcattgccaaggtcatccagaacctggccaacttttccaagtttacctcaaaggaggactttctgggcttcatgaatgagtttctggagctggaatggggttccatgcagcagtttttgtacgagatctccaatctggacacgctaaccaacagcagtagctttgagggttacatcgacttgggccgagagctctccacactgcatgccctactctgggaggtgctgccccagctcagcaaggaagccctcctgaagctgggtccactgccccggctcctcaacgacatcagcacagctctgaggaaccccaacatccaaaggcagccaagccgccagagtgagcggccccggcctcagcctgtggtactgcgggggccatcggctgagatgcagggctacatgatgcgggacctcaacagctccatcgaccttcagtccttcatggctcgaggcctcaacagctctatggacatggctcgcctcccctccccaaccaaggaaaagccacccccaccaccgcctggtggtggtaaagacctgttctatgtaagccgtccacccctggcccgttcctcaccagcatactgcacgagcagctcggacatcacagagccagagcagaagatgctgagtgtcaacaagagtgtgtccatgctggacttacagggtgatgggcctggtggccgcctcaacagcagcagtgtttcgaacctggcggccgtaggggacctgctgcactcaagccaggcctcgctgacagcagccttggggctacggcctgcgcctgccggacgcctctcccaggggagtggctcatccatcacggcggctggcatgcgcctcagccagatgggtgtcaccacagacggtgtccctgcccagcaactgcgaatccccctctccttccagaaccctctcttccacatggctgctgatgggccaggtcccccaggcggccatggagggggcggtggccatggcccaccttcctcccatcaccaccaccaccaccatcaccaccaccgaggtggagagccccctggggacacctttgccccattccatggctatagcaagagtgaggacctctcttccggggtccccaagccccctgctgcctccatccttcatagccacagctacagtgatgagtttggaccctctggcactgacttcacccgtcggcagctttcactccaggacaacctgcagcacatgctgtcccctccccagatcaccattggtccccagaggccagccccctcagggcctggaggtgggagcggtgggggcagcggtgggggtggcgggggccagccgcctccattgcagaggggcaagtctcagcagttgacagtcagcgcagcccagaaaccccggccatccagcgggaatctattgcagtccccagagccaagttatggccccgcccgtccacggcaacagagcctcagcaaggagggcagcattgggggcagcgggggcagcggtggcggagggggtggggggctgaagccctccatcaccaagcagcattctcagacaccatccacattgaaccccacaatgccagcctctgagcggacagtggcctgggtctccaacatgcctcacctgtcggctgacatcgagagtgcccacatcgagcgggaagagtacaagctcaaggagtactcaaaatcgatggatgagagccggctggatagggtgaaggagtacgaggaggagattcactcactgaaagagcggctgcacatgtccaaccggaagctggaagagtatgagcggaggctgctgtcccaggaagaacaaaccagcaaaatcctgatgcagtatcaggcccgactggagcagagtgagaagaggctaaggcagcagcaggcagagaaggattcccagatcaagagcatcattggcaggctgatgctggtggaggaggagctgcgccgggaccaccccgccatggctgagccgctgccagaacccaagaagaggctgctcgacgctcagctcctcatcaggtaattctcctggttccgctttggccacgggcggaggacacagggggaggtgactccggaccactgcaggttggtcgtgaagcccactccctccaacacctccggggcctctcccctctcactgctgccctccacacccagagaacctccacagactccagccctccgacacctgcacagatccatctcccaagacaccacccaaagagagcatttgctgctgcttcccagaactgtccaacataccttagcagcc

SEQ ID NO: 821 - DNA, 998 bp, Homo sapiens
  CDS (109)..(693)
ggcggaattcgaagggcctcctccctctccagtgtggtgactgggctgaggagattctgggactgatagtgtcatggtggagcctccgtccctgctcatcctctccgcatgttgcttctgctcccgatggctctctctgaaatgcagcacaacctcctaggccaatggaagaaggcccagagctggctccctgcctggaagcacgaggagacccgcacaggcatcctgagaaggcgtggagagcaggctgccttcatggggggagtgccagggcctgggcacccacacccgctgacccaagagggcccgggcacctgcgtgctggcctcttcactgaccttcgctctgtctgctctctttgtgtctctctctgacctccagaggcctcctttctctctgccaggaacagtagcccccctgcaaggccctccttttcctccagcccgcagcctgcggcctctccggttctgctccacagcccggctgccacacactcgcctctctctccaggccccccgggttccctccgcctctcttgctgcctgttctctccttttgcaggttgcgtttattggcttatctctgggggttggtgctctcccttgtttccatggaaactgcctggccccaggaggcccaagcagctttgagctccaagggcaggaccatgcaggccatcgctgccctgccgcttagccacagggcacgatttctgactcggtttattagagacatagtgtggcagtctctagaccccacagtcgggctggcatctggggacaggaccaacacccccacaccccagaggcgaactgtggtgagtgtaaagagcccctctccaagggaagacagccggtcagagtgcggtgtgctgtgctggagagcacagccccaggcgtgacaaacacctcggcctcttagaagttgtcccttatctggacaggaagtctggaggctgaaacagagactcccaccttcccagagtctcctgggcagtg

SEQ ID NO: 822 - DNA, 1966 bp, Homo sapiens
  CDS (196)..(1653)
ttcgtagtccactagcccagggcggggaattcgtaatgcagacgggataggggtgtgtgtgtgaggggagggggcctgtatggcaactgctcttgccccagcgtccccaaaagtgcagaggcagcggctgcagcatccagccagcttggatgtctggcctacttccaggactctgaagaaacagttacaagcaggatgcttttcccaacctctgcgcaagaatcttcccgtggcctcccagatgcaaatgacttgtgccttggcctgcagtccctcagtctgacaggctgggaccgaccctggagcacccaggactcagattcctcagcccagagcagcacacactcggtactgagcatgctccataacccactgggaaatgtcctaggaaaaccccccttgagcttcctgcctctggatccccttgggtctgacttggtggacaagtttccagcaccctcagttagaggatcacgcctggacacccggcccatcctggactctcgatctagcagcccctctgactcagacaccagtggcttcagctctggatcagatcatctctcagatttgatttcaagccttcgcatttctccacctctgcccttcctgtctctgtcagggggtggtcccagagaccctttaaagatgggggtagggtctcggatggaccaagagcaagctgctcttgctgcagtcactccctccccaaccagtgcttcaaagagatggccaggagcttctgtgtggccatcctgggacctcctcgaagctcccaaagaccccttcagcatagagagagaggccaggctgcaccgacaagctgcagctgtgaatgaagccacctgtacctggagtggccagcttcctccccggaactataagaaccccatctactcttgcaaggtgtttctaggaggtgttccttgggatattacagaagctggattagttaacaccttccgtgtttttggctctttgagtgtggagtggcctggtaaggatggcaagcatccccggtgtcctcccaaagggtatgtgtatctggtcttcgaactagagaagtctgtccgatccttgcttcaggcttgctctcatgacccgctgagcccagatggcctgagtgaatattatttcaagatgtccagccgaaggatgcgctgcaaggaggtgcaggtgatcccctgggtattagccgacagtaactttgtccggagcccatctcagaggcttgaccccagcaggacggtgtttgtcggtgctctgcatggaatgctaaatgctgaggccctggcagccatcttgaacgacctatttggtggagtggtgtatgccgggattgacacagataagcacaagtatcccattggttctggtcgtgtgactttcaataaccaacggagttacctgaaagcagtcagcgctgcttttgtggagatcaaaaccaccaagttcacaaagaaggttcagattgacccctacctagaagattctctgtgtcatatctgcagttctcagcctggtcctttcttctgtcgagatcaggtctgcttcaaatacttctgccggagctgctggcactggcggcacagcatggagggcctgcgccaccacagccccctgatgcggaaccagaagaaccgagattccagctagaggagctggccttgcccagtggcctgtggcgcccaaagctggcaggtcaggcaagcagcctgcaccaccctgccactggcgaccagggagctggcttcccaaggacaagggaaaattgtagtcacctttgcacttgctgaatctgtctttgtttctgcactaattaatgcacattgagttttgtcaggttttgttttcagggggtgtaccaagggcaaggaccctctggcttaccctccaagcgactctgtagttttcccagattttagttcctcattttgcagatgaaaagcggggaaaaaaaaaaaaa

SEQ ID NO: 823 - DNA, 297 bp, Homo sapiens
  CDS (21)..(272)
aaaaagcataatgacattagatggcggccttatgctgttgtctctggaagatctccggctgtgaggaagtccctctaacttacaacctgctcaagagcctcctagataaagcgcactgtgtactcctgacaccttgtgggtacatcttttccttgatcagtccagaaattctcaaactcactttaatcactttgcagatcctcttaatactcaaaaatctacacttactgtggctgacagtttcaagcagatgtgttcatcgcagtagtgcatgaaaagaaaagtagaagaaccctg

SEQ ID NO: 824 - DNA, 2810 bp, Homo sapiens
  CDS (541)..(2136)
aaggatccttaattaaattaatcccccccccccgcggggtcctcttgtagcggccacgttgatctgcgatacgcgtgtttgcccagtgagtggccccggactgctacgtgggactgcggtgaatgaacccagaaggtggagaggaaccgttctcggtgcacagaggcggctctgcagcccggtgagggcgcctgctgctcccgggcagtgctttccccaagtagtccgatggctgcggctgcgccgaagcgccctactcaggagcaacttggcgaggttcagactcttggagccagaagctacatgacccctaaacgggcacagtgacttttgaagacgtggctgtgaaatttacccaggaggaatggaatctccttagtgaggctcagagatgcctgtaccgtgatgtgactctggagaacctggcacttatgtcctccctggcagggcactgtgacctttgaagatgtggctgtgaacttttcccaggaggagtggtgtcttcttagtgaggctcagaggtgcttgtaccgtgatgtgatgctagagaacctggctctcatatcctcgctgggttgttggtgtggatcaaaagatgaggaggcaccttgtaagcagagaatttctgtacaaagagagtctcagagcaggactcctagggcaggtgtttctcctaagaaggctcacccctgtgaaatgtgtggcctcatcttggaggatgtttttcactttgctgaccaccaggaaactcatcacaagcagaagctgaacaggagtggagcatgtggaaaaaacttggatgacactgcataccttcatcagcaccagaagcagcatattggagagaaattctacagaaagagtgtcagagaagcatcgtttgtaaagaaacgtaagctcagggtgtcacaggagccatttgtcttccgcgagtttgggaaggacgttctgcccagttcaggattgtgccaagaagcagctgctgtagagaagacagacagtgaaactatgcatggcccaccctttcaggagggaaaaactaattacagttgtggaaaacgcacaaaagccttcagcaccaaacactcagttattccacaccagaaacttttcactagagatggatgttatgtgtgcagtgattgtggaaaatcctttagcagatatgtcagcttcagtaatcatcagcgagatcacactgcaaaaggaccttatgattgtggagagtgtgggaaatcttatagtcgaaagagcagccttattcaacatcagcgagtccacactggacagacagcttatccctgtgaggagtgcgggaaatcttttagtcagaagggcagccttattagccatcagcttgttcacactggagaaaggccttatgagtgtagagaatatgggaaatcttttggtcaaaagggtaacctcattcaacatcagcaaggtcacactggagagagagcttatcactgtggggaatgtgggaaatcttttcgtcagaagttctgctttattaaccatcagcgtgttcacactggagaaaggccttacaagtgtggagaatgtgggaaatcttttggtcaaaagggcaacctcgttcaccatcagcgaggtcatactggagaaaggccctatgagtgcaaggaatgtgggaaatcatttaggtacagatcccacctcactgaacaccagagacttcacactggggaaagaccttacaattgtagggaatgtgggaaattatttaacaggaagtatcatcttctggttcatgagagagttcacactggagaaaggccatatgcgtgtgaggtatgtgggaaattatttggcaataagcgcagcgtgactatacatcagaggattcacactggagaaaggccgtatgaatgcagtgaatgtgggaaatcatttctttccagctctgcgcttcatgttcataaaagagttcattctggacaaaagccttataagtgcagtgaatgtggaaaatccttttctgaatgttccagtctcattaaacacaggagaattcacactggagaaaggccttatgaatgcaccaaatgtggaaaaacatttcagcgaagctctaccctccttcatcatcagagttcacacaggagaaaggccttatgagtgcagtgaatatgggaaatcgtttgctgaagcatcccgtctcgttaaacacaggagagttcatactggagaaaggccttacaatggtagggaatgtgggaaattatttaacaggaagtatcatcttctcgttcatgagagagttcacactggagaaaggccatatgcgtgtgaggtatgtgggaaattatttggcaataagcacagcgtgactatacatacagaggattcacactgagagaaaggaccgtatgaagtgcagtgaatgtgggaaatcatttctttccggctctgcgcttcatgttcataaaagagtgcattctggacaaaagccttataagtgcatgtgaatgtggaaaatccttttctgaatgttccagtctcattaaacacaggagaattcacactggagacaggccttatgaatgcaccaaatgtggaacaacatttcagcgaagctctagcctccttcatcatcagagttcacacaggagaaaggccttatgagtgcagtgaatatggggaacatcgtatgctgaaacatcccgtctcgttaaacacaggagagttcatactggagaaaggacttatgagtgctgtcaatctgggaaacatcagaatgtctgctctccttggtcttaagagacttcgcattggaacggagtctcatt

SEQ ID NO: 825 - DNA, 891 bp, Homo sapiens
  CDS (157)..(552)
cccacgcgtccggttctacacattccttagagattggatggggtgcatcaggatgggttatgattacttttcttcttgcctcagcctttcagtgccacagaccccaaggccatcggccatcggaactaccatgcaggtgggtggatgggcgtatgaatgccaaatgctgggacttcatgcctgcttccactctcccccatcccagcttgggccatcattttgatattctctcacctactttttctgctttgcagagtggggatggtgattggccccattagcccatatctcccccattcctggcttagcctcactgcacccctctctatcctcccaggctactccatgtttggggctggcctcaccgtaggcctgtctaacctcttctgtggagtctgcgtgggcatcgtgggcagtggggctgccctggccgatgctcaaaaccccagcctctttgtaaagattctcatcgtggagatctttggcagcgccattggcctctttggggtcatcgtcgcaattcttcagacctccagagtgaagatgggtgactagatgatatgtgtaggtgaggccgtgctcactattatgtattgctggttttcctgggacagctagagctgtgtcccttagcctttcagaggctatggtattcaggtgcctccctgcactcgactcttgctacgtgtagatttggatgcactgcagtccaggacgaatactcagtgcggcgaacaggctgctgcagctgactcttgtcaactggcatctgtgttcccagctcagccttaaacgatctcaaagtgtttgtgaataaacatggaattttctggtcaaaaataattagtcaagggggtgcgaaacttattccgtaatgagggtaattttaac

SEQ ID NO: 826 - DNA, 1381 bp, Homo sapiens
  CDS (238)..(1278)
cctttgtgcagatcaggcccgtggattggtgagtgaatcctaaccacgtcttccctggcctgtcttcactcttctccccagaatcaccacttctgcactggtgtctgaaggtgtattgagtgattttgtggagggcagaagtaggaagtctttgggacaaaactgtatttaccttgggatctgtgaacaagaggaacctcagcagccaggacaggcaggagcagtggaatagctactatggcttctggaatcctggttaatgtaaaggaggaggtgacctgccccatctgcctggaactcctgacacaacccctgagcctggactgcggccacagcttctgccaagcatgcctcactgcaaaccacaagaagtccatgctagacaaaggagagagtagctgccctgtgtgccggatcagttaccagcctgagaacatacggcctaatcggcatgtagccaacatagtggagaagctcagggaggtcaagttgagcccagaggggcagaaagttgatcattgtgcacgccatggagagaaacttctactcttctgtcaggaggacgggaaggtcatttgctggctttgtgagcggtctcaggagcaccgtggtcaccacacgttcctcacagaggaggttgcccgggagtaccaagtgaagctccaggcagctctggagatgctgaggcagaagcagcaggaagctgaagagttggaagctgacatcagagaagagaaagcttcctggaagactcaaatacagtatgacaaaaccaacgtcttggcagattttgagcaactgagagacatcctggactgggaggagagcaatgagctgcaaaacctggagaaggaggaggaagacattctgaaaagccttacgaactctgaaactgagatggtgcagcagacccagtccctgagagagctcatctcagatctggagcatcggctgcaggggtcagtgatggagctgcttcagggtgtggatggcgtcataaaaaggacggagaacgtgaccttgaagaagccagaaacttttccaaaaaatcaaaggagagtgtttcgagctcctgatctgaaaggaatgctagaagtgtttagagagctgacagatgtccgacgctactggggtaaggagaagtcacattatcataagccaccctgcggcttatcattattattatctttatcttttagaattttatgttctctattaggctcatgttttaagatttatgattctccttccaagacacacataacttacccctccttataacttctaaacaaggttcctcccagttttctctcaagtctttatcaagatttctctcatatcacaaataaagttacattatatcccttaaaaaaaaaaaaaa

SEQ ID NO: 827 - DNA, 2518 bp, Homo sapiens
  CDS (24)..(2171)
cagcccccccgtggctgggaggcatggaggaggtcatcgtggcccaggtggaccatggcttgggctcagcatgggtccccagccatcggcgggtgaacccacccacactgcgcatgaagaagctgaactggcagaagctgccatccaacgtggcacgtgagcacaactctatgtgggcgtccctgagcagccccgacgccgaggctgtggagcccgacttctccagcatcgagcgactattctccttccctgcagccaagcccaaggagcccaccatggtggccccccgggccaggaaggagcccaaggagatcactttcctcgatgccaagaagagcctgaacctcaacatcttcctgaagcaatttaagtgctccaacgaggaggtcgctgctatgatccgggctggagataccaccaagtttgatgtggaggttctcaaacaactccttaagctccttcccgagaagcacgagattgaaaacctgcgggcattcacagaggagcgagccaagctggccagcgccgaccacttctacctcctcctgctggccattccctgctaccagctgcgaatcgagtgcatgctgctgtgtgagggcgcggccgccgtgctggacatggtgcggcccaaggcccagctggtgctggctgcctgcgaaagcctgctcaccagccgccagctgcccatcttctgccagctgatcctgagaattgggaacttcctcaactacggcagccacaccggtgacgccgacggcttcaagatcagcacattgctgaagctcacggagaccaagtcccagcagaaccgcgtgacgctgctgcaccacgtgctggaggaagcggaaaagagccaccccgacctcctgcagctgccccgggacctggaacagccctcgcaagcagcagggatcaacctggagatcatccgctcagaggccagctccaacctgaagaagcttctggagaccgagcggaaggtgtctgcctccgtggccgaggtccaggagcagtacaccgagcgcctccaggccagcatctcggccttccgggcactggacgagctgtttgaggccatcgagcagaagcaacgggagctggccgactacctgtgtgaggacgcccagcagctgtccctggaggacacgttcagcaccatgaaggctttccgggaccttttcctccgcgccctgaaggagaacaaggaccggaaggagcaggcggcgaaggcagagaggaggaagcagcagctggcggaggaggaggcgcggcggcctcggggagaggacgggaagcctgtcaggaaggggcccgggaagcaggaggaggtgtgtgtcatcgatgccctgctggctgacatcaggaagggcttccagctgcggaagacagcccggggccgcggggacaccgacgggggcagcaaggcagcctccatggatcccccaagagccacagagcctgtggccaccagtaaccctgcaggagaccccgtgggcagcacgcgctgtcccgcctctgagcccggccttgatgctacaacagccagcgagtcccggggctgggaccttgtagacgccgtgacccccggccctcagcccaccctggagcagttggaggagggtggtccccggcccctggagaggcgttcttcctggtatgtggatgccagcgatgtcctaaccactgaggatccccagtgcccccagcccttggagggggcctggccggtgactctgggagatgctcaggccctgaagcccctcaagttctccagcaaccagccccctgcagccggaagttcaaggcaagatgccaaggatcccacgtccttgctgggcgtcctccaggccgaggccgacagcacaagtgaggggctggaggacgctgtccacagccgtggtgccagaccccctgcagcaggcccaggtggggatgaggacgaggacgaggaggacacggccccagagtccgcactggacacatccctggacaagtccttctccgaggatgcggtgaccgactcctcggggtcgggcacactccccagggcccggggccgggcctcaaaggggaccgggaagcgaaggaagaagcgtccctccaggagccaggaagaggttccccctgattctgatgataataaaacaaagaaactgtgtgtgatccagtaaggcctcaggcccaggcccaaggccaagtgagagagcccaggccacaggacatgctgccattctgccaagagaggctcttctgggggccaggctgggactgggccccggaaaccaaaactccgtgccttacccagccggggccctcctggagccttcttggggtgttgtggctgggaacccgacaggcaccagtgccctgccaggcctggtgccctcctggaccgcctgcacgtgccagcctcccacctgcttcctaaaggcaaccctggcccacacccgcatgcgcccggtgcagcctgccaagggccagtcggggggtgctgcgtcctgccagtgtccaccaa

SEQ ID NO: 828 - DNA, 2109 bp, Homo sapiens
  CDS (169)..(621)
gtgctgactacaagggcaacccagctctcagaggaactggcccagctccgggatgcctatcagaagcagaaggagcagctgcggcaacaactagaagcccctccaagccagagggatgggcactttctccaggaaagccggcgactctctgcccagtttgaaaatctcatggcagagagccgccaggacctggaggaggagtatgagcctcagttcctgcggctcctagagaggaaagaagctgggaccaaagctctgcagagaacccaggctgagatccaggaaatgaaggaggctctgagacccctgcaagcagaggcccggcagctccgcctgcaaaacaggaacctggaggaccagatcgcacttgtgaggcaaaaacgagatgaagaggtgcagcagtacagggaacagctggaggaaatggaagaacgccagaggcagttaagaaatggggtgcaactccagcaacagaagaacaaagagatggaacagctaaggctcagtcttgctgaagagctctctacttataaggctatgctactacccaagagcctggaacaggctgatgctcccacttctcaggcaggtggaatggagacacagtctcaaggggctgtttagaaatatatggccaaatctgtaacccggaaacagcaaaaaacttcttagcaaaggatcactaagtaccctttggatgtactcttccaaccagacaagagtgccagaaacttggcaagcaattcatcctgtggaagttgcaaatactggctgacctgcttaaaaagattctagagttggccggaggcagaacatgtcaactctttgctggattctatttcatctgctgttgatactgatctcaatgcaccaaggaaaggaaagatgagcctcctgtcttccagcaacaaccctcacatatgcactgagtaaaggatgaatgtatggacacatctgggagtattttaaagaatgtatcttgccttgtgttgacccaaaccaaaaacatttttgaggggcacatgtggggtcaaaaagatagccaatttccattacatgggtttacaatttccattcttttgtgccacgagtgttagaatttaaatgaatacttttacaaagtctactttttgttcaaggatatgctgacccatatagtttactcttaaaattgtgtcaaggtatttctcactatactctaaaacaactagacttgaaaagaaaccatttgagatttgaatctaatggttaacgctattcagattttcccaaagatcttacctcatgaaagtagttctgggtcagaatgatctactcagttaaaaaacaacaacaacaaaaaactaagcgattgggaaaaaacaggaattttatctggttattgcatctggtgatagaggccttcaaagcctattatttctaacctaagtaaaggccccagtgaaaaacatactggggaaataaaacctctgagaaaaggttcaagcaccttttccaaatttaaatcttgccttaaattctctctaccacactgcctttgacactcttggaagtccatgtagttctctacagacagacttcaaagaaacgttaccttatcaaagactaatctgtgccacctctgattcagtgttttatgtctttcactttccctgggaaggagtaaagttcttttctacagctctgggactattacatttaattctgctcttgatagtcaaagaccatggacaacaactgtcatctgaaggactcttctagaagccagagactggtgtttgatggatgttttatactaaataaaacccatcagcatggggttatgtagaaaagcaatttattccattttaagcacttacacagttagtcatggagagtaacaggcctgctggtgaaacaggtcacccaaaatggagatggcatcaaactagtggtcaaggactaactcctaaaaaaaaaaagcaactcttatcaaggattaatttaatttttaaaacaaatacaagttattgattcactcttctcaacttgacagtctacctgtggtataactgtcaggtaaaaacatacatctttacaacttggtggtcccaagttaaaaaaaaaaaa

SEQ ID NO: 829 - DNA, 2336 bp, Homo sapiens
  CDS (15)..(1712)
ggcacgaggtggagatggatgcggcagacaggagctgcacagtgtctgtgcactgcagcaaccatcgtgtcaagatgctggtgaagttccctgcacagtacccaaacaacgccgccccttccttccagtttattaaccccacaaccatcacatccaccatgaaagctaagctgctgaagatcctgaaggacacagccctgcagaaagtgaagcgtggccagagctgcctggagccctgcctgcgccagctcgtctcctgccttgagtcctttgtgaaccaggaagacagcgcttccagcaacccgtttgcactccccaactctgtcactccccccttaccgacgtttgcgcgggtgaccacggcttacgggtcgtaccaggacgccaacattccctttcctaggacttctggggccaggttctgcggagcaggttacctggtatatttcacaaggcccatgacaatgcatcgggcggtgtctcccacagagcctactccgagatctctctcagccttgtctgcttatcacactggcttgatcgcgcccatgaagatccgcacagaggcccctgggaaccttcgtttatacagtgggagccccactcgcagcgagaaagagcaggtctccatcagctccttctactacaaggagcggaaatcaagacgatggaaaagtaagcgtgagggatcagactctggcaatcgacagatcaaggctgctgggaaagtcatcatccaggatattgcttgcctcctgcctgttcacaaatcgctgggagagctgtacatattgaatgtgaatgatattcaggaaacatgtcagaagaatgccgcctctgccttgctcgttggaagaaaggatcttgtccaggtttggtcgctggctacggtagctacagatctttgccttggtccgaaatctgacccagatttggaaacaccctgggctcgacatccatttgggcggcagctgctggagtccctgttggctcactattgccggctccgggatgttcagacactggcgatgctctgtagcgtgtttgaagcccagtctcggcctcaggggctaccaaacccctttgggccttttcctaaccgttcttctaatcttgtggtgtcccatagtcgatatcctagctttacctcttctggttcctgctccagtatgtcagacccagggctcaacactggcggctggaacatagcgggaagagaggcagagcacttgtcctccccttggggagaatcctcaccagaagagctccgctttgggagtctgacctacagtgatccccgtgagcgagaacgcgaccagcatgataaaaataaaaggctcctggaccccgccaatacccagcaatttgatgactttaagaaatgctatggggaaatcctctaccgttggggtctgagagagaagcgagctgaagtgttgaagtttgtctcctgtcctcctgaccctcacaaagggatcgagttcggcgtgtactgcagccactgccggagtgaggtccgtggcacgcagtgtgccatctgcaaaggcttcacgttccagtgtgccatctgtcacgtggctgtgcggggatcgtccaatttctgcctgacctgtgggcacggtggccacaccagccacatgatggagtggtttcggacccaggaggtgtgtcccaccgggtgtgggtgccactgcctgcttgaaagcactttctgaacctacagaagttgggtattgtctgaaatcccagaggacccataagtgccggtgacaagctgtctgtcaggggagaggctccagaacctgggttcgtccccagtgagaccggaggatgatcccccaaggactgcgcagcatcagctcttggtgggcctctgccttctcttctgtttggccacctggtgtggatgtcactgtgtgaagataaggacagaagtgcagagctgcgctttgtgtgttgtctatgtcggctgagctaccaaggtggaagttttcatggagaaaagcacctggctccagggccagtgttacagtgttaccctgtaaggtgttagccttaaaccaccgagcagcgttctcttgatgccagtgcagagaccagagtcagatgcccgaggacagtgggtaggaatttcatcaacaaatggacctatggcatcatggctttagaagctggtacatttactgagctgatggacagtggccttctaaaatatgacacttaaattgtaaatatgcactgtacttaaggattcttaagatgtatttttttgttatttctcctccagctgctatcccttggctaataaaattctagtaatttgaaaaaaaaaaaaa

SEQ ID NO: 830 - DNA, 1215 bp, Homo sapiens
  CDS (1015)..(1167)
gttcaacttcgatttaagtcctagggcctgacaaagtgaccctggataaatgtcatctccagccatctgttttctttagttctcattacatctgtccaggctcttctatcagcatcaatcctttcctgcagggacggaagagttttcaaatccttgctgaaagcattttgttctcctctgtaacagcacagggcatgaaattgtttggagtctttttatcaaattctctatagactacatgatccgtgccaataccacagcagtcagcagctgttgtctgtgctaggagaccacagtagtaattacacacaggttaagtggcttaaaaaaattgatcggttttgaaaattaggtgtggaagatagaaaggaacctgaggatttttataatatttttgtgatataatagactatagccaaaagagttactttatagtgagtatttttagcttcagtcccacattctcttcagaaattagtattataatccttttcattactctaaccgagtctgatgactcctgtcctaggatgaaacacccctcccaactcccttattaagagattgggaccttagtgtgattaacagcaccctgatcgatgagcaagatttcttacagattaaggaaaagaattgctgacaacttaggctgacctttatatacctatttgttttccttcctaattcctcttaaaatgaaaatgccaagattttcttttgatatttgttacatttgtgaaataatataacaatgcagttaatgggaagagcatgacccctggattcagatatccaatagttacaaatctcagcttcagcacctagcagttatgtgaactttcttctctgcacctcagtctcttcataataactactttgcagagttgctgtgaatattagtgtaaataatggacattcaaatatagctattactgttattatcatcatcaattattctacctatagaaatatgcaagttccttggaagtatacatttctggagagtgatcagggatgggatattatacttttattttttcggtttctcttcattcattcagtgggttatgggtatgtgtgtgtgtgtgtgtgtgtttcacacattatgtgctaggcactatttcaggcacttggaacgtacattattgtaggggtacaactggaaactgataaatgctgtaaaaaaaattaaacaagctaagaggtacaggaggt

SEQ ID NO: 831 - DNA, 2904 bp, Homo sapiens
  CDS (1)..(2595)
  misc_feature (1)...(2904): n = a,t,c or g
atggtggcgagcgcgcgagtgcagaagctggtgcggcgctacaagctggcgattgccacggcgctggccatcctgctgctgcagggcctggtagtgtggagcttcagcggcctggaggaggacgaggcgggcgagaaaggaaggcagaggaagccacggccactggaccctggcgaaggttccaaggacacagacagttcagcagggcgacggggcagcacaggcagaaggcatgggcgctggcggggccgtgctgagagcccaggagtgcccgtggccaaggtggtacgggcagtaaccagccggcagagagccagccggcgggtcccacctgccccacctccggaagccccaggccgccagaacctgagtggggcagcagctggggaggcgctggtaggggcagctggcttcccaccacacggagatacagggagcgtggagggcgccccccagcccacggacaatggcttcacccccaagtgcgagatcgtgggcaaggacgcactgtctgcactggcccgggccagcaccaagcagtgccagcaggagatcgccaatgtggtgtgcctgcaccaggctgggagcctcatgcccaaggctgtgccccggcactgtcagctgactgggaagatgagccccggcatccagtgggatgagagccaagcccagcagcccatggatggccccccggtgcgaatcgcctacatgctggtggttcacggccgcgccatccgccagctgaagcgtctcctcaaggccgtttatcacgagcagcacttcttttacatccatgtggacaagcgttccgactacctgcaccgggaggtggtggagctggcccagggctatgataacgtgcgggtgacgccctggcgcatggttaccatctggggcggggccagcctcctgacgatgtacctgcggagcatgcgggacctgctagaggtgcctggctgggcctgggacttcttcatcaacctcagtgccactgactatccaaccaggaccaatgaggagctggtggcattcctatccaagaaccgggacaagaatttcctcaagtcacatggccgggacaactccaggttcatcaagaaacagggcctggaccggctcttccatgagtgcgactcacacatgtggcgcctgggcgagcggcagatcccagcaggcattgtggtggatggcggttctgactggttcgtgctgacacgcagctttgtggagtatgtggtgtacacagatgacccgcttgtggcccagctgcgccagttctacacatacacactgctcccagccgagtccttcttccacacggtgctggagaacagcctggcctgtgagaccctcgtggacaacaacctgcgggtcaccaactggaaccgcaagctgggctgcaagtgccagtacaagcacattgtggactggtgtggctgctcccccaacgacttcaagccacaggacttcctccggctgcagcaagtctccagacccaccttcttcgcccggaagttcgagtcgactgtgaaccaggaggtgctggaaatcctggacttccacctgtatggcagctacccccccggcacgccagccctcaaggcctactgggagaacacctacgacgcggctgatggccccagtgggctcagtgatgtcatgctcactgcttacacagccttcgcccgcctcagcctgcaccatgccgccactgctgcacccccaatgggcaccccactctgcaggtttgagcccaggggcttgccgtccagcgtgcacctgtatttctatgacgaccatttccagggctacctggtgacgcaggcggtgcagccctcagcccaggggccggcagagacgcttgagatgtggctgatgccccaagggtcgctgaagctgttggggcgcagtgaccaggccagccggctccagagtctggaggttggcactgattgggaccccaaagagcgtcttttccggaactttggggggttactggggccgctggacgagcctgtggccgtgcagcgctgggcccggggccccaacctcacagccacagtggtctggatcgacccaacctatgtggtggccacatcttatgacatcacagtagatacggagactgaggtcacgcaatacaagcccccactgagccggcccctgcggccagggccctggactgttcgactccttcagttctgggaaccgctgggtgagacccgcttccttgtgctgcccttgaccttcaaccgcaaactacctctcaggaaagatgatgccagctggctgcacgcagggccaccccacaacgagtacatggagcagagtttccagggcctgagtagcatcctgaacctgcctcagccggagctcgcggaggaggctgcccagcggcacacacagctcacaggccctgcgctcgaggcctggacagacagggaactgagcagcttctggtccgtggctggactgtgtgccataggcccctctccctgcccctccctggagccctgcagactgaccagctggagctctctgtcccccgaccccaaatcagagctggggcctgtcaaagcagacgggcgactcaggtagcagggccccagccagtacccgtggaggacccgggaaattgcaccttacagacagtggaggggtgtcccctcccacaggcaagaaccagagggccaggctgcacaccatttcagccatccagagccacacagacggcagggaaagtggacacagtatgaactactgctgatgtctctgttngggatcagaggctggcgggaccgagaagggcacagcagattcacaccagtcttctcacttcctgctagttgaattgcttttcttttcgtttgttgtttaattaaaaaggaaatgggtgtggagaac

SEQ ID NO: 832 - DNA, 1096 bp, Homo sapiens
  CDS (2)..(1054)
gatgtctgacaagaaccagatagctgccagagcttctcttattgagcaactgatgtccaaaaggaattttgaggatcttggcaaccaccttactgagctagaaacaatttatgtgactaaggagcatctccaggagacagatgtggtcagagctgtgtacagagtcctcaaaaactgcccctctgtggctttgaaaaagaaagccaagtgtttgctatcaaagtggaaagctgtttataagcagactcactccaaagcgaggaacagccctaaattatttcctgtgaggggtaataaagaagaaaattcaggaccttctcatgacccaagtcagaatgagacactgggcatctgcagctcgaattctctgtcttcccaagacgttgcaaaactcagtgaaatgattgtgcctgaaaatagagccattcaactgaaacctaaggaagagcattttggggatggtgaccctgaatccactggcaagagatcgagtgagttgctggatcccacaacacccatgagaactaaatgcatagagcttctttacgcagctttaactagttcttccacagatcaacccaaagctgatttgtggcaaaactttgcaagagaaattgaagagcatgtttttaccctttattcaaagaacatcaaaaaatataaaacttgcatcagaagcaaagttgccaatttgaagaaccccagaaattctcatttacaacaaaacttgctctctgggaccacgtctccacgagaatttgctgaaatgactgtcatggagatggcaaataaggaactgaagcagttgagagcctcctacacggaatcttgtatccaggaacattaccttccccaagtaattgatggcacacagacaaataaaataaaatgcagacgctgtgagaaatacaattgcaaagtcactgtaattgacagaggaacacttttccttcccagctgggtgcggaattcaaacccagatgaacaaatgatgacttacgtaatttgtaacgaatgtggggagcagtggtaccatagcaagtgggtgtgctggtaactgtaaatcagtgttctcttaacagataaaaaaaaaaaa

SEQ ID NO: 833 - DNA, 2225 bp, Homo sapiens
  CDS (115)..(1896)
  misc_feature (1)...(2225): n = a,t,c or g
gaccgcgctggaattnnncgtcgacccacgcgtccgctccaagaccagcctcctggggggaccaggcacccggccttcactggcacccagggagccgtcctcagcagcgtcaacatgtcaaggcccagcagcagagccatttacttgcaccggaaggagtactcccagaacctcacctcagagcccaccctcctgcagcacagggtggagcacttgatgacatgcaagcaggggagtcagagagtccaggggcccgaggatgccttgcagaagctgttcgagatggatgcacagggccgggtgtggagccaagacttgatcctgcaggtcagggacggctggctgcagctgctggacattgagaccaaggaggagctggactcttaccgcctagacagcatccaggccatgaatgtggcgctcaacacatgttcctacaactccatcctgtccatcaccgtgcaggagccgggcctgccaggcactagcactctgctcttccagtgccaggaagtgggggcagagcgactgaagaccagcctgcagaaggctctggaggaagagctggagcaaagcagacctcgacttggaggccttcagccaggccaggacagatggagggggcctgctatggaaaggccgctccctatggagcaggcacgctatctggagccggggatccctccagaacagccccaccagaggaccctagagcacagcctcccaccatccccaaggcccctgccacgccacaccagtgcccgagaaccaagtgcctttactctgcctcctccaaggcggtcctcttcccccgaggacccagagagggacgaggaagtgctgaaccatgtcctaagggacattgagctgttcatgggaaagctggagaaggcccaggcaaagaccagcaggaagaagaaatttgggaaaaaaaacaaggaccagggaggtctcacccaggcacagtacattgactgcttccagaagatcaagcacagcttcaacctcctgggaaggctggccacctggctgaaggagacaagtgcccctgagctcgtacacatcctcttcaagtccctgaacttcatcctggccaggtgccctgaggctggcctagcagcccaagtgatctcacccctcctcacccctaaagctatcaacctgctacagtcctgtctaagcccacctgagagtaacctttggatggggttgggcccagcctggaccactagccgggccgactggacaggcgatgagcccctgccctaccaacccacattctcagatgactggcaacttccagagccctccagccaagcacccttaggataccaggaccctgtttcccttcggcggggaagtcataggttagggagcacctcacactttcctcaggagaagacacacaaccatgaccctcagcctggggaccccaactccaggccctccagccccaaacctgcccagccagccctgaaaatgcaagtcttgtacgagtttgaagctaggaacccacgggaactgactgtggtccagggagagaagctggaggttctggaccacagcaagcggtggtggctggtgaagaatgaggcgggacggagcggctacattccaagcaacatcctggagcccctacagccggggacccctgggacccagggccagtcaccctctcgggttccaatgcttcgacttagctcgaggcctgaagaggtcacagactggctgcaggcagagaacttctccactgccacggtgaggacacttgggtccctgacggggagccagctacttcgcataagacctggggagctacagatgctatgtccacaggaggccccacgaatcctgtcccggctggaggctgtcagaaggatgctggggataagcccttaggcaccagcttagacacctccaagaaccaggccccgctgatgcaagatggcagatctgatacccattagagccccgagaattcctcttctggatcccagtttgcagcaaaccccacaccccagctcacacagcaaaaacaatggacaggcccagagggtgaagcaaacagtgtcccttctggctgtgttggagcctccccagtaaccacctatttattttacctctttcccaaacctggagcatttatgcctaggcttgtcaagaatctgttcagtccctctccttctcaataaaagcatcttcaagcttgtaaaaaaaaaaaaaaa

SEQ ID NO: 834 - DNA, 2023 bp, Homo sapiens
  CDS (153)..(1775)
ggggaagtctggagaaggcattgtttcaattattaaaagtgtgggggcagtgggcggaacaaacgcgccgactacagaggctggacgtaagcttagcggtggcgcgcgtgcgcagcgccggcccgagttgccaaaacaaaggggatttggtgatggaggctttgttagaaggaatacaaaatcgagggcatggtgggggatttttgacatcttgtgaagcagaactacaggagctcatgaaacagattgacataatggtggctcataaaaaatctgaatgggaaggacgtacacatgctctagaaacttgcttgaaaatccgtgaacaggaacttaagagtcttaggagtcagttggatgtgacacataaggaggttggaatgttgcatcagcaggtagaagaacatgaaaaaatcaagcaagagatgaccatggaatataagcaggagttgaagaaactacatgaagaattatgcatactgaagagaagctatgaaaagcttcagaaaaagcaaatgagggaattcagaggaaataccaaaaatcacagggaagatcggtctgaaattgagaggttaactgcaaaaatagaggaattccgtcagaaatcgctggactgggagaagcaacgcttgatttatcagcaacaggtatcttcactggaggcacaaaggaaggctctggctgaacaatcagagataattcaggctcagcttgtcaatcggaaacagaaattagagtctgtggaactttctagccaatcagaaattcaacacttaagcagtaaactggagcgggctaatgacactatctgtgccaatgagttggaaatagagcgcctcaccatgagggtcaatgacttggttggaaccagtatgactgtcctacaggagcagcagcaaaaagaagaaaaattgagggaatctgaaaaactattagaggctctgcaggaagaaaagagagaattgaaggcagctcttcagtctcaagaaaatctcatacatgaggccagaatacaaaaggagaagttacaagaaaaagtaaaggcaactaacactcaacatgctgtagaagctataaggccacgggaagaatctctggcagaaaagaagtacacctctcaagggcagggggacttagacagtgtgctctcccagttgaattttacccatactagtgaggaccttctgcaggcagaggtgacttgtcttgaaggcagtttggaatctgtgagtgcaacgtgtaaacagctgagccaagaactaatggaaaaatatgaagaactgaagaggatggaagcacataacaatgaatacaaagcagagattaagaagttgaaagaacagattttacagggtgaacaaagttacagttctgcactagaaggaatgaagatggaaatctcccatctaactcaggagttacatcagcgagatatcactattgcttccaccaaaggttcttcctcagacatggaaaagcgactcagagcagagatgcaaaaggcagaagacaaagcagtagagcataaggagattttggatcagctggagtcactcaaattagaaaatcgtcatctttctgaaatggtgatgaaattggaattgggtttacatgagtgttccttgcctgtatctccccttggttcaatagctaccagatttttggaagaggaggaactgaggtctcatcacattctagagcgcttggatgcccatattgaagaactaaaaagagagagtgaaaagacagtgagacaattcacagccttaaagtagcctcttaaaaaaatcacaatcttggaaataaaaataaacaccaaagagttactgtcatctgaagtagcagctctttaaaaacatgaagagataaaattataaaaatgatacatctaaagcagtggtgaagaaagctgaaaaactgatacttttgataggcattttctctgcactggtttgtttaaaggacttcttccagcaataagttgaaagaataaaccactttgctagaaaaaaaaaaaaaa

SEQ ID NO: 835 - DNA, 12078 bp, Homo sapiens
  CDS (1)..(12075)
atgcacaatacagttgtgttgttttctagcagtgacaagttcactttgaatcaggatatgtgtgtagtttgtggcagttttggccaaggagcagaaggaagattacttgcctgttctcagtgtggtcagtgttaccatccatactgtgtcagtattaagatcactaaagtggttcttagcaaaggttggaggtgtcttgagtgcactgtgtgtgaggcctgtgggaaggcaactgacccaggaagactcctgctgtgtgatgactgtgacataagttatcacacctactgcctagaccctccattgcagacagttcccaaaggaggctggaagtgcaaatggtgtgtttggtgcagacactgtggagcaacatctgcaggtctaagatgtgaatggcagaacaattacacacagtgcgctccttgtgcaagcttatcttcctgtccagtctgctatcgaaactatagagaagaagatcttattctgcaatgtagacaatgtgatagatggatgcatgcagtttgtcagaacttaaatactgaggaagaagtggaaaatgtagcagacattggttttgattgtagcatgtgcagaccctatatgcctgcgtctaatgtgccttcctcagactgctgtgaatcttcacttgtagcacaaattgtcacaaaagtaaaagagctagacccacccaagacttatacccaggatggtgtgtgtttgactgaatcagggatgactcagttacagagcctcacagttacagttccaagaagaaaacggtcaaaaccaaaattgaaattgaagattataaatcagaatagcgtggccgtccttcagacccctccagacatccaatcagagcattcaagggatggtgaaatggatgatagtcgagaaggagaacttatggattgtgatggaaaatcagaatctagtcctgagcgggaagctgtggatgatgaaactaagggagtggaaggaacagatggtgtcaaaaagagaaaaaggaaaccatacagaccaggtattggtggatttatggtgcggcaaagaagtcgaactgggcaagggaaaaccaaaagatctgtgatcagaaaagattcctcaggctctatttccgagcagttaccttgcagagatgatggctggagtgagcagttaccagatactttagttgatgaatctgtttctgttactgaaagcactgaaaaaataaagaagagataccgaaaaaggaaaaataagcttgaagaaactttccctgcctatttacaagaagctttctttggaaaagatcttctagatacaagtagacaaagcaagataagtttagataatctgtcagaagatggagctcagcttttatataaaacaaacatgaacacaggtttcttggatccttccttagatccactacttagttcatcctcggctccaacaaaatctggaactcacggtcctgctgatgacccattagctgatatttctgaagttttaaacacagatgatgacattcttggaataatttcagatgatctagcaaaatcagttgatcattcagatattggtcctgtcactgatgatccttcctctttgcctcagccaaatgtcaatcagagttcacgaccattaagtgaagaacagctagatgggatcctcagtcctgaactagacaaaatggtcacagatggagcaattcttggaaaattatataaaattccagagcttggcggaaaagatgttgaagacttatttacagctgtacttagtcctgcgaacactcagccaactccattgccacagcctcccccaccaacacagctgttgccaatacacaatcaggatgctttttcacggatgcctctcatgaatggccttattggatccagtcctcatctcccacataattctttgccacctggaagcggactgggaactttctctgcaattgcacaatcctcttatcctgatgccagggataaaaattcagcctttaatccaatggcaagtgatcctaacaactcttggacatcatcagctcccactgtggaaggagaaaatgacacaatgtcgaatgcccagagaagcacgcttaagtgggagaaagaggaggctctgggtgaaatggcaactgttgccccagttctctacaccaatattaatttccccaacttaaaggaagaattccctgattggactactagagtgaagcaaattgccaaattgtggagaaaagcaagctcacaagaaagagcaccatatgtgcaaaaagccagagataacagagctgctttacgcattaataaagtacagatgtcaaatgattccatgaaaaggcagcaacagcaagatagcattgatcccagctctcgtattgattcggagctttttaaagatcctttaaagcaaagagaatcagaacatgaacaggaatggaaatttagacagcaaatgcgtcagaaaagtaagcagcaagctaaaattgaagccacacagaaacttgaacaggtgaaaaatgagcagcagcagcagcaacaacagcaatttggttctcagcatcttctggtgcagtctggttcagatacaccaagtagtgggatacagagtcccttgacacctcagcctggcaatggaaatatgtctcctgcacagtcattccataaagaactgtttacaaaacagccacccagtacccctacgtctacatcttcagatgatgtgtttgtaaagccacaagctccacctcctcctccagccccatcccggattcccatccaggatagtctttctcaggctcagacttctcagccaccctcaccgcaagtgttttcacctgggtcctctaactcacgaccaccatctccaatggatccatatgcaaaaatggttggtacccctcgaccacctcctgtgggccatagtttttccagaagaaattctgctgcaccagtggaaaactgtacacctttatcatcggtatctaggccccttcaaatgaatgagacaacagcaaataggccatcccctgtcagagatttatgttcttcttccacgacaaataatgacccctatgcaaaacctccagacacacctaggcctgtgatgacagatcaatttcccaaatccttgggcctatcccggtctcctgtagtttcagaacaaactgcaaaaggccctatagcagctggaaccagtgatcactttactaaaccatctcctagggcagatgtgtttcaaagacaaaggatacctgactcatatgcacgacccttgttgacacctgcacctcttgatagtggtcctggaccttttaagactccaatgcaacctcctccatcctctcaggatccttatggatcagtgtcacaggcatcaaggcgattgtctgttgacccttatgaaaggcctgctttgacaccaagacctatagataatttttctcataatcagtcaaatgatccatatagtcagcctccccttaccccacatccagcagtgaatgaatcttttgcccatccttcaagggctttttcccagcctggaaccatatcaaggccaacatctcaggacccatactcccaacccccaggaactccacgacctgttgtagattcttattcccaatcttcaggaacagctaggtccaatacagacccttactctcaacctcctggaactccccggcctactactgttgacccatatagtcagcagccccaaaccccaagaccatctacacaaactgacttgtttgttacacctgtaacaaatcagaggcattctgatccatatgctcatcctcctggaacaccaagacctggaatttctgtcccttactctcagccaccagcaacaccaaggccaaggatttcagagggttttactaggtcctcaatgacaagaccagtcctcatgccaaatcaggatcctttcctgcaagcagcacaaaaccgaggaccagctttacctggcccgttggtaaggccacctgatacatgttcccagacacctaggccccctggacctggtctttcagacacatttagccgtgtttccccatctgctgcccgtgatccctatgatcagtctccaatgactccaagatctcagtctgactcttttggaacaagtcaaactgcccatgatgttgctgatcagccaaggcctggatcagaggggagcttctgtgcatcttcaaactctccaatgcactcccaaggccagcagttctctggtgtctcccaacttcctggacctgtgccaacttcaggagtaactgatacacagaatactgtaaatatggcccaagcagatacagagaaattgagacagcggcagaagttacgtgaaatcattctccagcagcaacagcagaagaagattgcaggtcgacaggagaaggggtcacaggactcacccgcagtgcctcatccagggcctcttcaacactggcaaccagagaatgttaaccaggctttcaccagacccccacctccctatcctgggaacattaggtctcctgttgcccctcctttaggacctagatatgctgttttcccaaaagatcagcgtggaccctatcctcctgatgttgctagtatggggatgagacctcatggatttagatttggatttccaggaggtagtcatggtaccatgccgagtcaagagcgcttccttgtgcctcctcagcaaatacagggatctggagtttctccacagctaagaagatcagtatctgtagatatgcctaggcctttaaataactcacaaatgaataatccagttggacttcctcagcatttttcaccacagagcttgccagttcagcagcacaacatactgggccaagcatatattgaactgagacatagggctcctgacggaaggcaacggctgcctttcagtgctccacctggcagcgttgtagaggcatcttctaatctgagacatggaaacttcattccccggccagactttccgggccctagacacacagaccccatgcgacgacctccccagggtctacctaatcagctacctgtgcacccagatttggaacaagtgccaccatctcaacaagagcaaggtcattctgtccattcatcttctatggtcatgaggactctgaaccatccactaggtggtgaattttcagaagctcctttgtcaacatctgtaccgtctgaaacaacgtctgataatttacagataaccacccagccttctgatggtctagaggaaaaacttgattctgatgacccttctgtgaaggaactggatgttaaagaccttgagggggttgaagtcaaagacttagatgatgaagatcttgaaaacttaaatttagatacagaggatggcaaggtagttgaattggatactttagataatttggaaactaatgatcccaacctggatgacctcttaaggtcaggagagtttgatatcattgcatatacagatccagaacttgacatgggagataagaaaagcatgtttaatgaggaactagaccttccaattgatgataagttagataatcagtgtgtatctgttgaaccaaaaaaaaaggaacaagaaaacaaaactctggttctctctgataaacattcaccacagaaaaaatccactgttaccaatgaggtaaaaacggaagtactgtctccaaattctaaggtggaatccaaatgtgaaactgaaaaaaatgatgagaataaagataatgttgacactccttgctcacaggcttctgctcactcagacctaaatgatggagaaaagacttctttgcatccttgtgatccagatctatttgagaaaagaaccaatcgagaaactgctggccccagtgcaaatgtcattcaggcatccactcaactacctgctcaagatgtaataaactcttgtggcataactggatcaactccagttctctcaagtttacttgctaatgagaaatctgataattcagacattaggccatcggggtctccaccaccaccaactctgccggcctccccatccaatcatgtgtcaagtttgcctcctttcatagcaccgcctggccgtgttttggataatgccatgaattctaatgtgacagtagtctctagggtaaaccatgttttttctcagggtgtgcaggtaaacccagggctcattccaggtcaatcaacagttaaccacagtctggggacaggaaaacctgcaactcaaactgggcctcaaacaagtcagtctggtaccagtagcatgtctggaccccaacagctaatgattcctcaaacattagcacagcagaatagagagaggccccttcttctagaagaacagcctctacttctacaggatcttttggatcaagaaaggcaagaacagcagcagcaaagacagatgcaagccatgattcgtcagcgatcagaaccgttcttccctaatattgattttgatgcaattacagatcctataatgaaagccaaaatggtggcccttaaaggtataaataaagtgatggcacaaaacaatctgggcatgccaccaatggtgatgagcaggttcccttttatgggccaggtggtaactggaacacagaacagtgaaggacagaaccttggaccacaggccattcctcaggatggcagtataacacatcagatttctaggcctaatcctccaaattttggtccaggctttgtcaatgattcacagcgtaagcagtatgaagagtggctccaggagacccaacagctgcttcaaatgcagcagaagtatcttgaagaacaaattggtgctcacagaaaatctaagaaggccctttcagctaaacaacgtactgccaagaaagctgggcgtgaatttccagaggaagatgcagaacaactcaagcatgttactgaacagcaaagcatggttcagaaacagctagaacagattcgtaaacaacagaaagaacatgctgaattgattgaagattatcggatcaaacagcagcagcaatgtgcaatggccccacctaccatgatgcccagtgtccagccccagccacccctaattccaggtgccactccacccaccatgagccaacccacctttcccatggtgccacagcagcttcagcaccagcagcacacaacagttatttctggccatactagccctgttagaatgcccagtttacctggatggcaacccaacagtgctcctgcccacctgcccctcaatcctcctagaattcagcccccaattgcccagttaccaataaaaacttgtacaccagccccagggacagtctcaaatgcaaatccacagagtggaccaccacctcgggtagaatttgatgacaacaatccctttagtgaaagttttcaagaacgggaacgtaaggaacgtttacgagaacagcaagagagacaacggatccaactcatgcaggaggtagatagacaaagagctttgcagcagaggatggaaatggagcagcatggtatggtgggctctgagataagtagtagtaggacatctgtgtcccagattcccttctacagttccgacttaccttgtgattttatgcaacctctaggaccccttcagcagtctccacaacaccaacagcaaatggggcaggttttacagcagcagaatatacaacaaggatcaattaattcaccctccacccaaactttcatgcagactaatgagcgaaggcaggtaggccctccttcatttgttcctgattcaccatcaatccctgttggaagcccaaatttttcttctgtgaagcagggacatggaaatctttctgggaccagcttccagcagtccccagtgaggccttcttttacacctgctttaccagcagcacctccagtagctaatagcagtctcccatgtggccaagattctactataacccatggacacagttatccgggatcaacccaatcgctcattcagttgtattctgatataatcccagaggaaaaagggaaaaagaaaagaacaagaaagaagaaaagagatgatgatgcagaatccaccaaggctccatcaactccccattcagatataactgccccaccgactccaggcatctcagaaactacctctactcctgcagtgagcacacccagtgagcttcctcaacaagccgaccaagagtcggtggaaccagtcggcccatccactcccaatatggcagcaggccagctatgtacagaattagagaacaaactgcccaatagtgatttctcacaagcaactccaaatcaacagacgtatgcaaattcagaagtagacaagctctccatggaaacccctgccaaaacagaagagataaaactggaaaaggctgagacagagtcctgcccaggccaagaggagcctaaattggaggaacagaatggtagtaaggtagaaggaaacgctgtagcctgtcctgtctcctcagcacagagtcctccccattctgctggggcccctgctgccaaaggagactcagggaatgaacttctgaaacacttgttgaaaaataaaaagtcatcttctcttttgaatcaaaaacctgagggcagtatttgttcagaagatgactgtacaaaggataataaactagttgagaagcagaacccagctgaaggactgcaaactttgggggctcaaatgcaaggtggttttggatgtggcaaccagttgccaaaaacagatggaggaagtgaaaccaagaaacagcgaagcaaacggactcagaggacgggtgagaaagcagcacctcgctcaaagaaaaggaaaaaggacgaagaggagaaacaagctatgtactctagcactgacacgtttacccacttgaaacaggtgaggcagctctctctgctccctctaatggaaccaatcattggagtgaactttgcgcactttcttccttatggcagtggccaatttaatagtgggaatcgacttctaggaacttttggcagtgctaccctggaaggggtttcggactactattctcagttgatctacaagcagaataatttaagtaatcctccaacaccccctgcctctcttcctcctacaccacctcctatggcttgtcagaagatggccaatggttttgcaacaactgaagaacttgctggaaaagccggagtgttagtgagccatgaagttaccaaaactctaggacctaaaccatttcagctgcccttcagaccccaggacgacttgttggcccgagctcttgctcagggccccaagacagttgatgtgccagcctccctcccaacaccacctcataacaatcaggaagaattaaggatacaggatcactgtggtgatcgagatactcctgacagttttgttccctcatcctctcctgagagtgtggttggggtagaagtgagcaggtatccagatctgtcattggtcaaggaggagcctccagaaccggtgccgtcccccatcattccaattcttcctagcactgctgggaaaagttcagaatcaagaaggaatgacatcaaaactgagccaggcactttatattttgcgtcaccttttggtccttccccaaatggtcccagatcaggtcttatatctgtagcaattactctgcatcctacagctgctgagaacattagcagtgttgtggctgcattttccgaccttcttcacgtccgaatccctaacagctatgaggttagcagtgctccagatgtcccatccatgggtttggtcagtagccacagaatcaacccgggtttggagtatcgacagcatttacttctccgtgggcctccgccaggatctgcaaaccctcccagattagtgagctcttaccggctgaagcagcctaatgtaccatttcctccaacaagcaatggtctttctggatataaggattctagtcatggtattgcagaaagcgcagcactcagaccacagtggtgttgtcattgtaaagtggttattcttggaagtggtgtgcggaaatctttcaaagatctgacccttttgaacaaggattcccgagaaagcaccaagagggtagagaaggacattgtcttctgtagtaataactgctttattctttattcatcaactgcacaagcgaaaaactcagaaaacaaggaatccattccttcattgccacaatcacctatgagagaaacgccttccaaagcatttcatcagtacagcaacaacatctccactttggatgtgcactgtctcccccagctcccagagaaagcttctccccctgcctcaccacccatcgccttccctcctgcttttgaagcagcccaagtcgaggccaagccagatgagctgaaggtgacagtcaagctgaagcctcggctaagagctgtccatggtgggtttgaagattgcaggccgctcaataaaaaatggagaggaatgaaatggaagaagtggagcattcatattgtaatccctaaggggacatttaaaccaccttgtgaggatgaaatagatgaatttctaaagaaattgggcacttcccttaaacctgatcctgtgcccaaagactatcggaaatgttgcttttgtcatgaagaaggtgatggattgacagatggaccagcaaggctactcaaccttgacttggatctgtgggtccacttgaactgcgctctgtggtccacggaggtctatgagactcaggctggtgccttaataaatgtggagctagctctgaggagaggcctacaaatgaaatgtgtcttctgtcacaagacgggtgccactagtggatgccacagatttcgatgcaccaacatttatcacttcacttgcgccattaaagcacaatgcatgttttttaaggacaaaactatgctttgccccatgcacaaaccaaagggaattcatgagcaagaattaagttactttgcagtcttcaggagggtctatgttcagcgtgatgaggtgcgacagattgctagcatcgtgcaacgaggagaacgggaccatacctttcgcgtgggtagcctcatcttccacacaattggtcagctgcttccacagcagatgcaagcattccattctcctaaagcactcttccctgtgggctatgaagccagccggctgtactggagcactcgctatgccaataggcgctgccgctacctgtgctccattgaggagaaggatgggcgcccagtgtttgtcatcaggattgtggaacaaggccatgaagacctggttctaagtgacatctcacctaaaggtgtctgggataagattttggagcctgtggcatgtgtgagaaaaaagtctgaaatgctccagcttttcccagcgtatttaaaaggagaggatctgtttggcctgaccgtctctgcagtggcacgcatagcggaatcacttcctggggttgaggcatgtgaaaattataccttccgatacggccgaaatcctctcatggaacttcctcttgccgttaaccccacaggttgtgcccgttctgaacctaaaatgagtgcccatgtcaagaggcctcacaccttaaacagcaccagcacctcaaagtcatttcagagcacagtcactggagaactgaacgcaccttatagtaaacagtttgttcactccaagtcatcgcagtaccggaagatgaaaactgaatggaaatccaatgtgtatctggcacggtctcggattcaggggctgggcctgtatgctgctcgagacattgagaaacacaccatggtcattgagtacatcgggactatcattcgaaacgaagtagccaacaggaaagagaagctttatgagtctcagaaccgtggtgtgtacatgttccgcatggataacgaccatgtgattgacgcgacgctcacaggagggcccgcaaggtatatcaaccattcgtgtgcacctaattgtgtggctgaagtggtgacttttgagagaggacacaaaattatcatcagctccagtcggagaatccagaaaggagaagagctctgctatgactataagtttgactttgaagatgaccagcacaagattccgtgtcactgtggagctgtgaactgccggaagtggatgaactga

SEQ ID NO: 836 - DNA, 2018 bp, Homo sapiens
  CDS (425)..(1501)
agagtcctggcgagggcgctggccgagaggtgctcggcttgtagcaggtcccgcactccagcctctcgctgccagggtttgctctctgcttgtcctgggctgaggtgtccatgacggagtcatccaaggaggaaaaaatctgttccgggtgagcccaggccgccccggatatgcgatggctgaggagcagacaccagggaccacactgaggttgggtttcagaccaagacactggattctcctagttaagataaagagctttgggtgcctgacagtgaaaatggtgtaatctgcgttaacagttcacagcttgaaggcatgacaattaaagaacacacatggacttgtggcacatggaaatgtgcgcacagaaaaaggaaatctataattcttttaaagtaggaaggcattcttccttgccaaaatgggtacgttctgttcggttatcaagtttgaaaatctacaagaattaaagagactgtgtcactggggtcccatcatagcccttggtgttatagcaatatgttctaccatggccatgattgactctgtgttgtggtattggcccttacatacaactggaggaagtgtgaatttcatcatgttgataaattggactgtcatgattctttataattacttcaatgccatgtttgtcggtccgggctttgtccctctggggtggaaaccggaaatttctcaggataccatgtatctccagtattgtaaagtctgccaagcatacaaggcaccacgttcacatcactgcagaaagtgtaacagatgtgtgatgaagatggaccatcactgtccttggatcaacaactgttgtggttaccaaaatcatgcttcgttcacactgtttctccttttagcaccactgggttgtatccatgctgctttcatttttgtgatgactatgtacacacagctttatcatcggatgaaaataattctcagaaacaaaacttctattgagtcatggattgaagagaaggctaaagatcgaattcagtattatcaactagatgaagtctttgtttttccatatgatatgggaagtagatggaggaactttaaacaggtatttacgtggtcaggggtccctgaaggagatggacttgagtggccagtaagagaaggctgtcaccaatacagcttaacaatagaacagttgaaacaaaaagcagataagagagtcagaagtgttcgctataaagtaatagaagattatagtggtgcctgctgccctctgaataaaggaatcaaaaccttcttcacaagtccctgcaccgaagagcctcgaatacagctgcaaaaaggggaattcattttagccacaagaggtttacgatactggttatatggagacaaaattcttgatgattcctttatagaaggtgtttcaagaataaggggttggttccctagaaaatgtgtggaaaagtgtccctgtgatgctgaaacagatcaagccccagagggggagaagaaaaatagatagctgctgttaaaacaaaattatcctttaagtctgcttaattacttgaaaattgtacatattactaaagaattatgcaatgagcctactctggttaagatgttcttttcctcaaaggtgccctagtgccatgatttaaatatttttattaccattttgaaatggagaagccattctgcatatgcctttgaattcctgcccctctttaccacctcttcctccccctcaaaggaaaaacatttcatccaagtaagttaacggcattttctgtaggattttcttatgcactgcacactctggacctcacctgcagatacagttccccccttgccaggagcatctgcatgtggtacttctcttttccctcagttgatatttcttatatgatattctagatactatagaactcaatttgtcagattcagtataacctcagattttgttacctgtcttttaaaaatgcagattttgtcaaatcaaataaagatcaatggatgttgggtataaaaaaaaaaaa

SEQ ID NO: 837 - DNA, 1645 bp, Homo sapiens
  CDS (338)..(1147)
aattccaccactcctcccaaaagctaccccggctgaagaagtggaagactccaatgactcatcatattcagagcccccagatgttcagcagcagttgaaccactatcagtcagctgccctggcaaggaacaacagccgtgttagccctgtgcctctttctggggctgctgctggcactgagcagaaaactgaagccgtgcttcactgcgaattctgtgaattctcctccggctacatccagagcatcaggcgtcattaccgggacaagcatggtgggaagaagcttttcaagtgcaaagactgctccttttacacaggctttaaatctgcttttactatgcacgtggaagctgggcactcagcagttcccgaggagggccccaaagatcttcgctgtcctctctgcctctatcacaccaaatacaagcgcaacatgattgaccacatcgtgctgcaccgagaagagcgtgttgtccccattgaagtttgccggtccaaactgtccaaatacttgcagggagtagttttccgctgtgataagtgtaccttcacctgctccagtgatgagagcctccagcaacatatagaaaagcacaatgaactgaaaccttacaaatgccagctctgctactatgagaccaagcacacggaggaactggacagccaccttcgggatgagcataaggtaagccgtaactttgagctggttggacgggttaacttggatcagctggaacagatgaaggagaaaatggagagctccagcagcgatgatgaggacaaggaagaagaaatgaacagcaaggctgaagacagagagctgatgagattttctgaccacggggctgctcttaacactgagaagcgttttccatgtgaattttgtggacgggcgttttcacagggctctgagtgggaaagacatgtgctgagacacggcatggcattgaatgacaccaagcaggtgagcagagaagaaatccacccaaaagagatcatggagaacagtgttaaaatgccctccatagaggaaaaggaagatgacgaggccattgggatagacttttccctaaagaatgaaacagtagccatctgtgtagtaactgccgacaaatctctcctggagaatgcagaggccaaaaaagaatgagcgtttggtgaaattcttaatcaaaccttacttgaacagtgatgaaaaagtgggagggctggcttgggctgagaagggagggacagaaaagagaagacagaacaaagctgctttttaggactgaacaatctattttcaaagcactggtacctgtgtgagtgagtatgtaaattaaagttatttaaatggttggaatatgtggctccttttccatcactacatcttttcttccggatcttcatcatggaagtttcatttgttgcggaatatggaagcacctcccaatggtacggtgcaccctgtggtggtcttggacagtatgtggaaacagaagctccatgacggtagaagacttctcattggggagcaactttttgacgcacaacttttggtgcgtttttctagttttaataccttaagctttttcaagacctaactgcagccgctttgggaaaaaaaaacaaaaaacaaaaaacagaaaacaaaaaaaaaaaa

SEQ ID NO: 838 - DNA, 936 bp, Homo sapiens
  CDS (505)..(801)
ccctcctgtactaggaggattgaagaggagtaattttctcgccatgcaactcagtgcgtagcctggggactgtctccactgctacggttgtggggtggggtctgcagtctgcactcgaggtcagcatgtcatactcagcctccccaggactgagatgggaacaagagaggcccaagtggctggcaggagaccaagctcctcaagcaaagcccagctctctggcctgtctttggcgggtgagcttttattatgtgcatagcagagaactttggaaacaccatcttccagtggtgggatctcttctctctctccttgtaggaatcaacgctgaatgtggacttggatttcaagcagcctttcctagagttgaatcgaatcctggaagccctgcacgaacaagacctgggtcctgcgttggagtaaggaggcccttgggtgggccagcagcactctgcttcgacctctcagggcacagggcttgactgtggtcttcatttcacccagatgtacttgacttgcctgcagccctgtctcaagagcctcacacaggcttttggggccctcctctcaggtgctggctctcaggtcctagcccccaccagctctacactaaactggcccctttcttcccagatgggccgtctcccacaggcagcgcctgctggaactcaacagctccctggagttcaagctgcaccgactgcacttcatccgcctcttggcaggaggccccgcgaagcagctggaggccctcagctatgctcggcacttccagccctttgctcggctgcaccagcggggtgagtgcccaggcagctggggttgtgctgcctggcctgacacatgtctggatgtggtaggttacatcaggctgccagtccctgcacccatgtggggctgtctgttacacagatgcctctccccaactagaaactt

SEQ ID NO: 839 - DNA, 804 bp, Homo sapiens
  CDS (545)..(775)
ggagtgatgggtggcatcacgggaatgtaggaacccgcaacgatgcagcacgaccatgcctgtccggggcgttataacatgcaagggtgagcgcagctctgtgcgggatacattagacagactccatcgtgaccaggtccgacctgtctgcctttagtgtcctttcccggccgatatcgcaggaaacccccgactctatcgacagcgggaaagaggctctgagactggagaggaaaccacggacctgcagggcccgcctcgcctctccgctaagccaagtggtgttcccaacttgcttcgacttgcttccgtgcgctcaggtcgcctgcccggtccagcagtggcgtatgatgcgcaggatggagcgcgcatgcgcactggccgccagccgaggacggaagtgggcgtccggaagctagacgtgtcccctgggcgtgacttggcactgccgcgtcgcagttgccgcattcgccgcattcgctgcaggcgcgagcgggctgccactgccgcagcagccgagcccaagtctgagggcgttgtggctatgactttcaagatttttctcctttttgcagggcttatggttaaagttcctgtggggttatatttttcctgcaaattacttcttttccaaagtctgatgttgatgtcccctgaagacagcggcttttatgcgaccattgttgcagtggtcgggcttcatgtggtgctggcaattttcgtcttcatagtgtggaaggagggcttgccccagtggcgggaaaacaaaaacgaatagagcagcttcttcagagctgcagacgt

SEQ ID NO: 840 - DNA, 2816 bp, Homo sapiens; identical to SEQ ID NO: 359
  CDS (228)..(2813)

SEQ ID NO: 841 - DNA, 709 bp, Homo sapiens
  CDS (225)..(509)
tgatcttccgtcccaaaataaattaataaataaaaaaaataaaaatcaaataaagaaaaacaaaatcaataaacaaagaaagtggtttccgctgtgccctctgaaacttaaagtctcttactgacttttctaaacctaagtgtctccatccatagtgggggataccaaggccatggtcacaccctgatgtgactgtctcatgaggaaatgatgggaattcctttatgactctgcagtggtccctccgtgtctgctggagggggtcctggctgattcccagctctacatcctgtagattctcacacccagggcctccttcggcctcttctcaggggagtctcagagcaggagcctctctcccttgcccagtgaaagtcattctcccctctcccatccacctcacccgcggccacaatcctgagacttccccccgggaggcacacttctcctccctgccctgctgctcccacggaaaccctgtcctgcttctcacactgacatctgctctctaatcacagaggatcctgtcattaaaagattcttggcctgggacaaagatctgagggtgtcggacaaggtaaggttgttctccatgtaactgttcctgttccaacgcatggctggggggagggcgcagcttccaaacccacagttctccctccaccacctcccaccagatgctcctacagtctttttgtgtgtgtgtgtg

SEQ ID NO: 842 - DNA, 2960 bp, Homo sapiens
  CDS (229)..(1860)
tcgacccacgcgtccggcagcatcgcttgtcctgagctggttgccggggcaggggtttaggcggaggcagaggtggaggcgctttgaaagccgtcattgtgtggcactggacggggaatcaagagacccggtttctaatccctgctctgtcactaacaagctgcgtgatcttcggaaaaaagtaatcctcttggaaagctggaaacatagtccgaagcttaagtgaaaatgatacatgttagaagacatgaaacaaggagaaattctaagagtcacgtgcctgagcagaaatctcgagttgattggaggcgaactaaaagaagtagtatctcacaattacttgatagtgatgaagagcttgatagtgaagaatttgatagtgatgaagagcttgatagtgatgaaagttttgaaaatgatgaagagcttgatagtaacaagggacctgattgtaataaaacaccaggaagtgaaagagagctcaacttaagtaaaattcaaagtgaaggaaatgacagtaagtgtctcattaactctggcaacggttcaacatatgaagaagaaacgaacaaaatcaaacataggaatattgacttacaagatcaggaaaaacatttaagtcaagaggataatgatctcaacaaacaaactggacaaataatagaggatgatgaggaaaaacatttaagtcaagaggataatgatctcaacaaacaaactggacaaataatagaggatgatttagaagaagaagacatcaagcgaggaaaaagaaaaaggctatcctctgtgatgtgtgacagtgatgagagtgatgacagcgatatcctagttagaaaagtaggtgttaaacgtccccgtagagtggttgaagatgaaggttcttcagtggaaatggagcaaaagactcctgaaaaaacattagctgcacaaaagcgagaaaaacttcagaagctcaaagaactctcaaaacaaagatctcgtcagagacgcagtagtggtagagattttgaggactctgaaaaggaatcttgcccaagcagtgatgaagttgatgaggaggaagaagaggataattatgaatctgatgaagatggagatgattatattatcgatgactttgtagtgcaagatgaggagggtgatgaagagaataaaaaccaacaaggagaaaaattgactacatcacaactgaaattagtaaaacagaattctctttattcttttagtgaccactatactcattttgaaagagttgtgaaggctcttctgatcaacgctttagatgaatcttttctgggaacattatatgatggcacaaggcaaaaatcatatgcaaaagatatgctaacatctcttcattatttggataaccgctttgttcagcctcgtctagagagcttggtatctagaagtcgttggaaagagcaatataaggagcgagtagaaaattattctaatgtaagtattcatttgaagaatcctgaaaactgttcctgccaggcttgtggactgcatcgctactgtaaatattcagtgcatttatcaggagagttgtataacaccaggaccatgcaaatagataatttcatgtcacatgataaacaggtgttcactgttggcagaatttgtgccagccgtaccagaatttatcataaactgaaacattttaaattcaaactataccaggaatgttgcaccattgcaatgacagaagaagttgaagatgaacaagttaaagaaacagtggaaagaattttcaggcggtcaaaagaaaatggctggattaaggagaaatatggtcaacttgaagaatatctcaattttgcggattactttcaagaagagaagtttgagttgtaacacatttccatcagagaagattttttaaattcctgtaaatgtgaagatcatgattcttgtttttctgtatcatgtgacatgtttgtacattttatctatatcttcatggcaaaatattttgtttaaaacatgattatcttaattcctgtgaagtggcactctacactctaattaaacttttatctgatgtacataaaagcattatcttaatttttaagtctgtaaatatattttaaagttatataataatggctttataacagatgactgtcaagtgaatgagctgttgatatcctgtcagtttagtcaaaatatattgtatcttaaaaatgtatttagactaacgtctacatgtatttttacggaattcctgtccagatctgtttattcttttacagtattaaatgattttcactaatatattttttactgctatcatctaaatcagtgggccatggaagaaacctcatatatcattcagttcaatcccattgcttcagaatcagatcatagcatatctattctaagtagaggaatgcttttttccttttcttgaaagtttctctttcaaatagatttcaggcctctagagtctttcaaccctcacattcaggaataattttatgtaaattttcatgctttataatgttcttacttttttctattcaattttgtctatatattgatgattaagatgtattttatttatttttatccatagctttttccatataagtatgtatcttagggtcagaactgctgaaagagacaaactcagccaaaaacacttggaaagcatattttggtatctgcattgctttgcatatctaaattttcccataaagtaataaagtaaaatggttgccagagtgaaaaaaaaaaacacgacacacacacaaccaaacaacacttttggggcgcgccgcgcgcccccgggaagaagcgctcacacaaccacccggggggcgccggggcccccagcgggacgggcgaaccggggccacgggggccccaaggaacaccgggcccgcgaacagcgggggggtcccccccaaaaaaagccggggggaaccagcgcgccggaccacccagacgcg

SEQ ID NO: 843 - DNA, 1291 bp, Homo sapiens
  CDS (12)..(812)
ccaacatcagaatggggccgcgatggagctgggggagccgggcgctcggtagcgcggcgggcaaggcaggcgccatgaccctgattgaaggggtgggtgatgaggtgaccgtccttttctcggtgcttgcctgccttctggtgctggcccttgcctgggtctcaacgcacaccgctgagggcggggacccactgccccagccgtcagggaccccaacgccatcccagcccagcgcagccatggcagctaccgacagcatgagaggggaggccccaggggcagagacccccagcctgagacacagaggtcaagctgcacagccagagcccagcacggggttcacagcaacaccgccagccccggactccccgcaggagcccctcgtgctacggctgaaattcctcaatgattcagagcaggtggccagggcctggccccacgacaccattggctccttgaaaaggacccagtttcccggccgggaacagcaggtgcgactcatctaccaagggcagctgctaggcgacgacacccagaccctgggcagccttcacctccctcccaactgcgttctccactgccacgtgtccacgagagtcggtcccccaaatcccccctgcccgccggggtccgagcccggcccctccgggctggaaatcggcagcctgctgctgcccctgctgctcctgctgttgctgctgctctggtactgccagatccagtaccggcccttctttcccctgaccgccactctgggcctggccggcttcaccctgctcctcagtctcctggcctttgccatgtaccgcccgtagtgcctccgcgggcgcttggcagcgtcgccggcccctccggaccttgctccccgcgccgcggcgggagctgctgcctgcccaggcccgcctctccggcctgcctcttcccgctgccctggagcccagccctgcgccgcagaggactcccgggactggcggaggccccgccctgcgaccgccggggctcggggccacctcccggggctgctgaccctcagcccgcactgggagtgggctcctcggggtcgggcatctgctgtcgctgcctcggccccgggcagagccgggccgccccgggggcccgtcttagtgttctgccggaggacccagccgcctccaatccctgacagctccttgggctgagttggggacgccaggtcggtgggaggctggtgaaggggagcggggaggggcagaggagttccccggaacccgtgcagattaaagtaactgtgaagttttcaaaaaaaaaaaaa

SEQ ID NO: 844 - DNA, 1248 bp, Homo sapiens
  CDS (183)..(539)
attctcgggtcgacgatttcgttaggcacccaacgtggccttctttgttcctgggctcagtgcactctgagtgcgggttcgtgatgactagtcttcagtctcgacagtaaggtctctgggtacactttttccaatgctcccctcttttcaggtttgttgactggtaatattccagggttattatgggacaattgcagtttaaacaccaggcttatctgtcttttattaaacttcttcttaaacagggtagaatcaaggctgattccaataaccttattctcttatttcagactattgaaaaacattgtccttggttccctgacaaagattctatggacctgttagactgggatagagttggcgccactctccgccaactcatgagagttggtgtttttcatcctatttctgtttggactgactgggctcttattcgtgttgctttacttccttttcagtctggtgatactcttcaaatgccagaagttaaggtggttggtgaaccattccctttaccttgggtagctgaccccccctactagtcctccttctgatgatgaagaagaattcgatctctccttgttttctccccaagaggaggaacctggtgttgatcccctccctccacctcctatcttggaacctgtatatattaactcttcttctaccaagccgttgtcccctctgccagaggaggatgtgtggcattcatctgaatcggctgtttctcattcctctcatccttttggacctctcccctcttctaagcctactgtttcttttgaggctccaggaccccttatttcagagactaatctggctgacttcgttggcactattgataatcatttacctaagtcaaaattctttcaatttctaagaaatacttcctggattctaccaaaacttacacattcatcaccaccagagacagccgttaccatttttactgatggatcaagtaatggaaaggcaggacacctgaaattatgtcctgaaaatgcatacaacaacaagacagagaaatttgctgaaaaagcaccacagcaagaaacaactaacacatccaatcatcaaaaagaagaaagtgaccatgctaactcctttacaacagacaatccagtcagccatcctgaacaacttgtctctgcagatccagatcccaggacccctaactataccaccagcttttctgagtttccaggttgcctattgcagattgtgggacttctcaactttcatactcat

SEQ ID NO: 845 - DNA, 2128 bp, Homo sapiens
  CDS (163)..(627)
aactgcgggcggcgcagggcaggggcagtcagggagcagcggcggcagagacagggccgggcgggcgccgcctgcggagagcaccgggaggcgggccctgcgtggggccgcgcgcagcagcggcgacgactttatctgggccgcgggggacagcgcagggccatggaggaggcggccgcagctccgatttctccgtggacgatggcagccacgattcaggccatggagaggaagattgaatcgcaggctgctcacctgctttccctagaaggtcaaaccgggatggccgagaagaagctggctgattgcgagaagacagccgtggagttcgggaaccagctggagggcaagtgggccgtgctggggaccctgctgcaggagtacgggctgctgcagaggcggctggagaacgtggagaacctgctgcacaacaggaacttctggatcctgcggctgcccccgggcagcaagggggagtcccctaagactacgccatctccaagtccgaggtcctctcccagattgaacaagggaaggagccctgcaactggcgccgccctgaccccaagattccagatgttcctgtggaccccagtccagatgcagaaactgaggcccagcagagattgagtaacttatgcgagttgtcactcacctcacacgccccagcaagcatccaggagagcctgcctcttggaatagaaatcagacatcccacaggaactctgaggttttcccactgctgccagatgtatgcaaggaacacgtgatcttcgtaattccagagcggggcaaactgcttggcacctcttcaataggtgacattcaatgatagatctctggcttcctgctctgtttgttctggttgccctggaaagcctgctgctcagcccatgccccgggacttcctccaccctcaccaggacattctttccatctcttgtctcctgtgtgcaagtccctttctcctggattccatgtcttgaatgtttcttaatttacttcctcattttggcagaggatgtcctccagttgttttctgggaatgctaatatgcaagtgaaccagtgacctgcagttctgcccacacagggttaataaccaatcagattctctcttttcaagatggttaacataacagacaccaagaaagggaagaggagccgacagcagagggggaagctgaaaagacgcacaaagaatggccataaaagatatgagcaaccccagctttccagacagtcacttttcccagtggtcatacctggtctggaagattccccatcatctcgaataaagctgttgttgcttttaactccatggagagaccgaatggagtgagcccagcagggcatgctgggcaagagaggtcccccgagtcccaaataagaatttcaactagtataaaacgaggcagcgaacccacacgtggaagtctgataccgcttgcagaagggaattgaatagatgtctccctattggtaaggatgtggttttattgacttgaaataacaaagcccgcaagcaacaactgatcatccgcgggatgctgccacaaggaataattgagcactcattcagacacaggggaaaccactgcctctttcagtctttctcccagattccaacagtcagtgttacagcatttcaccttgttcacctccctgagaagacgttgcagctcactcaccccagtgggcactgggagcctctgctcaggtgggagacagatgccccccacacgcacatctggtgtttatgaagcagatactggggcttcataaacacagaaggggcagggaagtagccccagggcatagtgtggggcctcctgactaaaagtagcttgcaaacccctgcctataacagccacttcctggcggtcattgtgccacttaggagccctcctcaccgctcttcctttagttccttcactctgtatagaccctgccagagcagctcagggtggagcagctgcagccatgggacctgctccaggcaaggccctatgctacacagtccctgggggtgaggattccagaggagtcaattccctacccgcccttccaggggatggccgagatgagcgttcccacagggaaagtgaaagttgcaaggctgttgcgga

SEQ ID NO: 846 - DNA, 1444 bp, Homo sapiens
  CDS (99)..(1187)
tttcgtctttccagcacctcaacacggactcggacacggaaggttttcttcttggggaagtaaaaggtgaagccaagaacagcattactgattcccaaatggatgatgttgaagttgtttatacaattgacattcagaaatatattccatgctatcagctttttagcttttataattcttcaggcgaagtaaatgagcaagcactgaagaaaatattatcaaatgtcaaaaagaatgtggtaggttggtacaaattccgtcgtcattcagatcagatcatgacgtttagagagaggctgcttcacaaaaacttgcaggagcatttttcaaaccaagaccttgtttttctgctattaacaccaagtataataacagaaagctgctctactcatcgactggaacattccttatataaacctcaaaaaggactttttcacagggtacctttagtggttgccaatctgggcatgtctgaacaactgggttataaaactgtatcaggttcctgtatgtccactggttttagccgagcagtacaaacacacagctctaaattttttgaagaagatggatccttaaaggaggtacataagataaatgaaatgtatgcttcattacaagaggaattaaagagtatatgcaaaaaagtggaagacagtgaacaagcagtagataaactagtaaaggatgtaaacagattaaaacgagaaattgagaaaaggagaggagcacagattcaggcagcaagagagaagaacatccaaaaagaccctcaggagaacatttttctttgtcaggcattacggaccttttttccaaattctgaatttcttcattcatgtgttatgtctttaaaaaatagacatgtttctaaaagtagctgtaactacaaccaccatctcgatgtagtagacaatctgaccttaatggtagaacacactgacattcctgaagctagtccagctagtacaccacaaatcattaagcataaaaccttagacttagatgacagatggcaattcaagagatctcggttgttagatacacaagacaaacgatctaaagcagatactggtagtagtaaccaagataaagcatccaaaatgagcagcccagaaacagatgaagaaattgaaaagatgaagggttttggtgaatattcacggtctcctacatttcgatccttttaaccttacaaggagatttttttatttggctgatgggtaaagccaaacatttctattgtttttactatgttgagctacttgcagtaagttcatttgtttttactatgttcacctgtttgcagtaatacacagataactcttagtgcatttacttcacaaagtactttttcaaacatcagatgcttttatttccaaacctttttttcacctttcactaagttgttgaggggaaggcttacacaacacattctttagaa

SEQ ID NO: 847 - DNA, 1581 bp, Homo sapiens
  CDS (212)..(1324)
tttttacaaaagagaggatttccttttctataaactgttttagacgcgttttagattaatgaagttgtgaagttaggtctcctgaagcctgagctgacggcagcacgaagggtaagagcaggtgttcttgggctttgtgttgaccagcttgccttacacaaccccagcactgtctgggacacggaaggtgttcttcttaaggaagtaaaagatgaaggcaagaatagcattactgattcccaaatggatgatgttgaagttgtttatacaattgacattcagaaatatattccatgctttttttagcttttataattcctcaagtgaagtaaatgagcaagcactgaagaaaatattctccaatgtcaaaaagaatgtgataggttggtacaaattctgtcgtcattcagatcagatcatgacgtttagagagaggctgcttcacaaaaacttgcaggagcatttttcaaaccaagaacttatttttctgctattaacaccaagtataataacagaaagctgcgctactcatcgactgaaacatgccttgaaacctcaaagaggactttttcacagggtacctttagtggttgccaatctggatatttctgaacaactaggttataaaactgtatcaggttcctctacatccactggttttagccaagcagtaaaaacacacagctctaaattttttgaagaagatggatccttaaaggaggtacataagataaatgaaatgtatgcttcattacaagaggaattaaagagtatatgcaaaaaagtggaagacagtgaacaagcagtagataaactagtaaaggatgtaaacagattaaaacgagaaattgagaaaaggagaggagcacagattcaggcagcaagagagaagaacatccaaaaagaccctcaggagaacatttttctttgtcaggcattacggaccttttttccaaattctgaatttcttcattcatgtgttatgtctttaaaaaatagacatgtttctaaaagtagctgtaactacaaccaccatctcgatgtagtagacaatctgaccttaatggtagaacacactgacattcctgaagctagtccagctagtacaccacaaatcattaagcataaaaccttagacttagatgacagatggcaattcaagagatctcggttgttagatacacaagacaaacgatctaaagcagatactggtagtagtaaccaagataaagcatccaaaatgagcagcccagaaacagatgaagaaattgaaaagatgaagggttttggtgaatattcacggtctcctacatttcgatccttttaaccttacaaggagatttttttatttggctgatgggtaaagccaaacatttctattgtttttactatgttgagctacttgcagtaagttcatttgtttttactatgttcacctgtttgcagtaatacacagataactcttagtgcatttacttcacaaagtactttttcaaacatcagatgcttttatttccaaacctttttttcacctttcactaagttgttgaggggaaggcttacacaacacattctttagaa

SEQ ID NO: 848 - DNA, 916 bp, Homo sapiens
  CDS (151)..(507)
acatgccctcaattctagaccatctcaatgttctcaagaaggctttgagacccacatacctttgggaaaatgttcccttttctgaattcatagcaattaccgtctgtatcacttctttggaattaattatgtacaagcagaccccaaattatggcaggcttgtcattgaaaagtttacttgtactttcattgtttagaacttggaataaatggtggttggatttccagctggcccatggaagcctctttaacctacaatgtattattagtcctgtcgtcgttcctcattgttttcaaggaaaacgtgtcctgacttccaagctggactttgggaagctgggaagagatctttctctggagctcaagcctctgggggtgccatgtgacttggcatgtccccttctctcctctctgactcacaaggagacattgtcactctcaggaatgacaagaagagcatccctgggcatcaccaaagccaaaagaaatatcacgtgtgaaattcaatgattgtggttgtttctcaaaaacaggtattcagtaggcatttgtaactccgaagcttcctgtacttaaaccgtgacaaagcttatatgtttatattaagcttttaatattttatgactgtcttcatggtttatgttcctggtgtatgggaaccatatctcagtttctttgtatgcagcaaatcctccagtccacagctaagcacataagagcagctcaataaacatttattgatccataattacagctacatgaaaaagcaattcagacaagagctgaatcagtcaagcactattaggcatcaaaacagataacgtaatgatttcacgcatacctggcttagctgtcttatcttcagtcttatagctcagatgcagttttaaaacgaaatcgtgacaggaagacgaaa

SEQ ID NO: 849 - DNA, 762 bp, Homo sapiens
  CDS (177)..(428)
gtggccgcgaatcaccagccagcctctgggtctgtagcaaccgcccagcgttgaggcgcggctcatgcccccagtatcccggtccagctattccgaggacatcgtgggctctcggagaaggcgacgcagctcctcggggagcccaccatccccgcagagcagatgttcctcttgggatggctgttcccgctctcactcccgcggccgtgagggcctcaggcctccttggagtgagttggacgtgggcgctctttacccctttagtcgctctgggtcgcgagggcggctcccaagattccgcaactacgccttcgcgtcctcctggtcgacctcgtatagtggatatcgctgccatcgtcactgctatgcagaagaacggcagtcagcggaagactacgagaaggaagagagccatcggcagaggaggctgaaggagagagagaggattggggaattgggagcgcctgaagtgtgggggccgtctccaaagttccctcagctagattctgacgaacataccccagttgaggatgaagaagaggtaacgcatcagaaaagcagcagttcagattccaactcggaagaacataggaaaaagaagaccagtcgttcaagaaacaagaaaaaaagaaagaataagtcgtctaaaagaaagcataggaaatattctgatagtgacagtaactcagagtctgacacaaattctgactctgatgatgataaaaagagagttaaagccaagaagaaaaaaaaaaaaaaaaa

SEQ ID NO: 850 - DNA, 1023 bp, Homo sapiens
  CDS (234)..(431)
ggaattcccgcgagcacatatctctgaatttcttgcaaattaaataagacgcagattctggctcaggaaagtgatgcatacgcgtcgttttcaaaggagagaccccagcctcgggtcaagcgcggcgcagacagcggcgcggggtccttggctgggcggggcttgctcgcggtggcttgtggctccttcctgcggtgcttctctctttcgctcaggcccgtggcgccgacaggatgggcaagtgtcgtggacttcgtactgctaggaagctccgtagtcaccgacgagaccagaagtggcatgataaacagtataagaaagctcatttgggcacagccctaaaggccaacccttttggaggtgcttctcatgcaaaaggaatcgtgctggaaaaagtaggagttgaagccaaacagccaaattctggccattaggaagtgtgtaagggtccagctgatcaagaatggcaagaaaatcacagcctttgtacccaatgacggttgctttgaacttttatttgaggaaaatgatgaagttctgggttgctggatttggtcgcaaaggtcatgctgttggtgatattcctggagtccgctttaaggttgtcaaagtagccaatgtttctcttttggccctatacaaaggcaagaaggaaagaccaagatcataaatattaatggtgaaaacactgtagtaataaactttcatatgaaacacacacagcaacaaaaaaaaatttgggggcgcggtgcggggcccagagaatgtctcagacactatcggggcggcgggggccagaggaacggacattgggcacagtggccaaggaaccgggccagagatacggctgtggttcccaccaaaaaacgccgggacccggtgcgacacccagggtccggggccacggttcacaaagggcaggtcgtacccccgcggtggataaaccgacaaagaaagaaacgaacaaaagcaacgcacagatcagctcaaactaacagagagtgaacacaagagagcgagaac

SEQ ID NO: 851 - DNA, 1573 bp, Homo sapiens
  CDS (97)..(1392)
acgcacgatggcgcgtccctgggctctgcggagaagggacccgagcagcccccggccctgtggaggaaggttgtggacttcctgctgaaggccatcatgcgcaccacgtggttcgccggcggcttccaccgggtggccgtgaaggggcggcaggcgctgcccaccgaggcggccatcctcacgctcgcgcctcactcgtcctacttcgacgccatccctgtgaccatgacgatgtcctccatcgtgatgaaggcagagagcagagacatcccgatctggggaactctgatccagtatatacggcctgtgttcgtgtcccggtcagaccaggattctcgcaggaaaacagtagaagaaatcaagagacgggcgcagtccaacggaaagtggccacagataatgatttttccagaaggaacttgtacaaacaggacctgcctaattaccttcaaacctggtgcattcatccctggagcgcccgtccagcctgtggttttacgatatccaaataaactggacaccatcacatggacgtggcaaggacctggagcgctggaaatcctgtggctcacgctgtgtcagtttcacaaccaagtggaaatcgagttccttcctgtgtacagcccttctgaggaggagaagaggaaccccgcgctgtatgccagcaacgtgcggcgagtcatggccgaggccttgggtgtctccgtgactgactacacgttcgaggactgccagctggccctggcggaaggacagctccgtctccccgctgacacttgccttttagaatttgccaggctcgtgcggggcctcgggctaaaaccagaaaagcttgaaaaagatctggacagatactcagaaagagccaggatgaagggaggagagaagataggtattgcggagtttgccgcctccctggaagtccccgtttctgacttgctggaagacatgttttcactgttcgacgagagcggcagcggcgaggtggacctgcgagagtgtgtggttgccctgtctgtcgtctgccggccggcccggaccctggacaccatccagctggctttcaagatgtacggagcgcaagaggacggcagcgtcggcgaaggtgacctgtcctgcatcctcaagacggccctgggggtggcagagctcaccgtgaccgacctattccgagccattgaccaagaggagaaggggaagatcacattcgctgacttccacaggtttgcagaaatgtaccctgccttcgcagaggaatacctgtacccggatcagacacatttcgaaagctgtgcagagacctcacctgcgccaatcccaaacggcttctgtgccgatttcagcccggaaaactcagacgctgggcggaagcctgttcgcaagaagctggattaggacccagggttgcggagagacgcggcccctcccgcgtggacatcaccgccatgagcctctttgcgagtgacctctgggctccgctcctcactcctgctgtacaggcactgtcttcagcccgagttccaggggcctcgggggctgtttgtatcttgctcctttgtgaagtgtgttgcag

SEQ ID NO: 852 - DNA, 685 bp, Homo sapiens
  CDS (421)..(603)
gcacgagctgcagttcgcggtacagtctctagtagagcgcgtgtatagaggcagagaggagtgaagtccacagttcctctcctccaagaggtagaaggggcgcggggaaacgacctggtatcggttttccgcttgctgatcaagagctccctttaatgccgcacgcaggccggcgcccctcactgataaacgattggggctgggcctcggcctggagggcgttcgtcctctcagtgccctcagctcgtaaaggaggaaaccgaggcgtggggttgggcgagaacccaggggtcctcctgcacccccgccgccgtgtgtctcgtgtccagcgctggctggagcgcctcagccctggcgcggtgtagtcgtgagctggaacttctgacactgccccttccttccccgtccagcctgccgaccatgcccgcgggcgtgcccatgtccacctacctgaaaatgttcgcagccagtctcctggccatgtgcgcaggggcagaagtggtgcacaggtactaccgaccggacctgacaatacctgaaattccaccaaagcgtggagaactcaaaacggagcttttgggactgaaaaaaagattctgtgaataatataagtcttaaatatgtatttcctaatttattgcatcaaactacttgtccttaagcacttagtctaatgctaactgca

SEQ ID NO: 853 - DNA, 2459 bp, Homo sapiens
  CDS (127)..(1911)
gttcgggcggggcaggaggcccgggcgcctgggtccccgcgtctccctcagcgccgcggttgggtcacggccggctccgcgcaggttctgtggcctgatccccaggaggagctactctgggttaccatgagagagaccttggaggccctcagctccctgggattctctgtgggacagccagagatggccccccaaagtgagcccagggaaggatcccataatgcccaggagcagatgtcctcttctagggaagagagagcactgggggtgtgctcagggcacgaggcccctacaccggaggaaggtgcccacacagaacaagccgaggctccctgcagaggccaggcgtgctcagcacagaaggctcagcctgtgggtacctgcccaggagaggagtggatgattcggaaggtgaaggtggaggacgaagatcaggaggcagaagaggaggtcgaatggccccagcatctatcgttacttcccagcccctttcccgcgcctgacctggggcatctggctgccgcgtacaaactggagccaggggccccgggggcactgagtgggctcgcgctgtctgggtggggtccgatgccggagaagccctacggctgcggggagtgtgagcggcgcttccgggaccagctgacgttgcgactgcaccagcggctgcaccggggcgagggcccctgcgcctgcccggactgcggccgcagcttcacgcagcgcgcccacatgctactgcatcagcgcagccaccgcggcgagcggcctttcccgtgctccgagtgcgacaagcgcttcagcaagaaggcccatctgacccgccacctgcgcacgcacacgggcgagcggccctacccgtgcgcggagtgcggcaagcgcttcagccagaagatccacctgggctcgcaccaaaagacccacaccggcgagcggcccttcccctgcacggaatgcgagaagcgctttcgcaagaagacgcacttgattcggcaccagcgcatccatacgggcgagaggccctaccagtgcgcacagtgcgcacgcagcttcacgcacaagcagcacttggtgcggcaccaaagggtgcaccagacggccggcccggccaggccctctcccgactcgtccgcttctcctcattccactgccccgtccccgaccccatcctttcccgggccaaagcctttcgcgtgctccgactgcggcttgagcttcggctggaaaaagaacctcgccacgcaccagtgtctgcaccgcagcgagggtcgcccctttgggtgcgatgagtgcgcactgggcgccaccgtggatgcccccgccgccaagcccctggccagcgcgcctggcggaccgggctgcggcccaggatccgatcccgtggtgccccagcgcgccccctcgggcgagcggtccttcttctgcccggactgcgggcgcggcttctcccatgggcagcacctggcgcggcacccgcgcgtgcacacgggcgaacggcccttcgcctgcacgcagtgtgaccgccgcttcggctcgcggcctaatctggtcgcccactccagggcccacagcggcgccaggcctttcgcctgcgctcagtgcggccgccgcttcagccgcaagtcgcacctgggccgccaccaggcggtgcacactggcagccgcccccacgcctgcgccgtctgcgcccgcagcttcagctccaaaaccaacctagtccgccaccaggcgatccacacaggctcccgccccttctcctgcccgcagtgcggaaagagcttcagccgcaagacccacctggtgcggcaccagctcattcacggcgaagccgcccacgcggccccggacgccgcccttgcggccccagcctggtccgctccccccgaggtggcgccgcccccgctcttcttctgagcctagttctcacgaggaccctttcttgcccacagtttcgagaggcccgtgccatgagaccgcctggggtgagcaaggcgacctgggctgctgcccgaaggtttggccgccgcgggacacctgtttccttcccgcagtgtctgcgtccgcacagcatacccagctcggacctcctaggacagagactcagcgaacccttgctgggaaccgctgagctgaagttcttggaaggctcccacccaggtgccccgttggaaagcagatatttcccggacccagcgcggcctcaaccagggcaggaaagagtggttatttatgtacttaaagtttcattaaagttaaaatcggaaagttctggggctgctaaatgaattgggggagggaacacctgactctccttagccactgtcccacctccatccacacacagaccacccccctccacttccccttctgtcctgggtgagttacatttagccagctgctgttaattggttctcccaaataaaaatgtaatatatttattcactaaaaaaaaaaaaaaa

SEQ ID NO: 854 - DNA, 900 bp, Homo sapiens
  CDS (66)..(827)
cgtaggtccagtgagaacaggcgtgaaatttatatctctgcccaggactgggtgcctgcatcgccatggacaccaccaggtacagcaagtggggcggcagctccgaggaggtccccggagggccctggggacgctgggtgcactggagcaggagacccctcttcttggccctggctgtcctggtcaccacagtcctttgggctgtgattctgagtatcctattgtccaagggctcggggacgcaggcgcagctgcagaccacgcgcgcggagcttggggaggcgcaggcgaagctgatggagcaggagagcgccctgcgggaactgcgtgagcgcgtgacccagggcttggctgaagccggcaggggccgtgaggacgtccgcactgagctgttccgggcgctggaggccgtgaggctccagaacaactcctgcgagccgtgccccacgtcgtggctgtccttcgagggctcctgctactttttctctgtgccaaagacgacgtgggcggcggcgcaggatcactgcgcagatgccagcgcgcacctggtgatcgttgggggcctggatgagcagggcttcctcactcggaacacgcgtggccgtggttactggctgggcctgagggctgtgcgccatctgggcaaggttcagggctaccagtgggtggacggagtctctctcagcttcagccactggaaccagggagagcccaatgacgcttgggggcgcgagaactgtgtcatgatgctgcacacggggctgtggaacgacgcaccgtgtgacagcgagaaggacggctggatctgtgagaaaaggcacaactgctgaccccgcccagtgccctggagccgcgcccattgcagcatgtcgtatcctgggggctgctcacctccctggc

SEQ ID NO: 855 - DNA, 1017 bp, Homo sapiens
  CDS (66)..(944)
cgtaggtccagtgagaacaggcgtgaaatttatatctctgcccaggactgggtgcctgcatcgccatggacaccaccaggtacagcaagtggggcggcagctccgaggaggtccccggagggccctggggacgctgggtgcactggagcaggagacccctcttcttggccctggctgtcctggtcaccacagtcctttgggctgtgattctgagtatcctattgtccaaggcctccacggagcgcgcggcgctgcttgacggccacgacctgctgaggacaaacgcctcgaagcagacggcggcgctgggtgccctgaaggaggaggtcggagactgccacagctgctgctcggggacgcaggcgcagctgcagaccacgcgcgcggagcttggggaggcgcaggcgaagctgatggagcaggagagcgccctgcgggaactgcgtgagcgcgtgacccagggcttggctgaagccggcaggggccgtgaggacgtccgcactgagctgttccgggcgctggaggccgtgaggctccagaacaactcctgcgagccgtgccccacgtcgtggctgtccttcgagggctcctgctactttttctctgtgccaaagacgacgtgggcggcggcgcaggatcactgcgcagatgccagcgcgcacctggtgatcgttgggggcctggatgagcagggcttcctcactcggaacacgcgtggccgtggttactggctgggcctgagggctgtgcgccatctgggcaaggttcagggctaccagtgggtggacggagtctctctcagcttcagccactggaaccagggagagcccaatgacgcttgggggcgcgagaactgtgtcatgatgctgcacacggggctgtggaacgacgcaccgtgtgacagcgagaaggacggctggatctgtgagaaaaggcacaactgctgaccccgcccagtgccctggagccgcgcccattgcagcatgtcgtatcctgggggctgctcacctccctggc

SEQ ID NO: 856 - DNA, 580 bp, Homo sapiens
  CDS (74)..(319)
gcagaagttgtctgagtgcgttggtcggcggcagtcgggccagacccaggactctgcgactttacatctttaaatggatgagatggctaccactcagatttccaaagatgagcttgatgaactcaaagaggcctttgcaaaagttgatctcaacagcaacggattcatttgtgactatgaacttcatgagctcttcaaggaagctaatatgccattaccaggatataaagtgagagaaattattcagaaactcatgctggatggtgacaggaataaagatgggaaaataagttttgacgaatttgtttatgtaagtatgtgaaaattcacaattattagaagtagtagatgttccctcgtctagtgggatgttatagtattaagtactgttatgttaagttcttaaatatatcatattagtactgttataacatttctgtcatcctgcccactaaatgtacttcttttagctgctggaatatcttaacaaacgaattgagaaaaagagcactgcagaaacaaagatataacatgataagatgttaaggtgataagttatataaggcgaacagtctccttt

SEQ ID NO: 857 - DNA, 368 bp, Homo sapiens
  CDS (45)..(230)
ggcttagctaggacctaggtttgcaaaagctcccagctgatctcatgcagccagcctggctctggctctggcgctgggagctgggttgggaactaatctttggggctattctgctgatacttcaagttgggctctttgactccgtcttgtattggcatcacttgtattcaggtctgttcttcccctggattgtaaactccttgatgtctgggtcatctcagctcatgagctgagctttcagtgggtgctcagtggaacaggtgctgaatggagtccggctctagggaggccagggtgtgttggtaagtgagagactaaaatccttttaaaaagaatctttttgcccttcagttgtgtttgccatgagt

SEQ ID NO: 858 - DNA, 1048 bp, Homo sapiens
  CDS (168)..(935)
gaatttccgggtcgacgatctcgtgcgttgggctgtaaagactaaggcgccagcggctggcgaagaaggaaagagggtactctctggctgggctggggccgtagcgacgtccgccgcgaacctgggccccccaaagctgcggggcgttcggtgtcgccgaagtaaacatgcaccctgagccctcggagcctgcgacaggtggtgcagcagagctggattgcgcgcaggagcccggcgtggaggagtctgcgggtgaccacgggagcgcaggccgagggggctgcaaggaagaaattaatgatcctaaggaaatatgtgtgggttcttctgacacatcctaccacagccagcagaaacagagtggtgataatgggtcaggtggtcacttcgcacacccaagagaagacagggaagatcggggccccagaatgactaaaagttccctgcaaaaactctgcaagcagcacaagctttatattaccccagcattgaatgatacgctgtatttacactttaaaggttttgatcgcattgagaacctggaagagtacacagggctgcgctgtctctggctgcagagcaatggaatacagaaaatcgaaaacctggaggcccaaactgagttgcgttgcctcttcttgcaaatgaacttgctccgtaaaattgagaacctggaacctctgcagaaactggatgctcttaacctcagcaacaattacatcaagaccattgaaaacctctcctgcctcccagtcctgaacacattgcagatggcccacaatcacctggagaccgtggaggacattcagcatctacaagagtgtttgaggctttgtgtccttgacctttcgcacaacaagctgagtgatccggaaatatggcctcaatatgtgccgccagtgtttccgtcagtacgcgaaggatatcggtttcattaagttggactaaatgctcttccttcagaggattatccggggcatctactcaatgtaaaaccatgataattctttgtatataaaataaacatttgaaaaaaccaaaaaaaaaa

SEQ ID NO: 859 - DNA, 1191 bp, Homo sapiens
  CDS (172)..(933)
tttcgtcgtagcccgagccccgccgccgtgtcgctcggcctgggcgtggccgtcgtgtcgagcctggtgaacgggtccacgttcgtgctacagaagaagggcatcgtgcgtgccaagcggcgaggtacttcctatttaacagacattgtgtggtgggctggcacaatcgcaatggctgttggccagattggaaacttcctggcttacacggcggtccccacggtcctggtaacccccctgggcgcccttggagtaccgttcgggtccattttagcttcctatctcctgaaggaaaagctcaacatcttgggcaagttggggtgcctgctaagctgtgcaggctccgtcgtgctgattatccactccccaaagtctgagagtgtgacgactcaggctgagctggaggaaaagctgaccaatccagtgtttgtgggctacctgtgcatcgtgctgctcatgctgctgctgctcatcttctggatcgcgccggcccatgggcccaccaacatcatggtctacatcagcatctgctccttgctgggcagtttcaccgtgccttccaccaagggcatcgggctggcggcccaagacatcttgcataacaacccgtccagtcagagagccctctgcctgtgcctggtactcctggccgtgctcggctgcagcatcatcgtccagttcaggtacatcaacaaggcgctggagtgcttcgactcctcggtgttcggggccatctactacgtcgtgtttaccacgctggtcctgctggcctcagccatcctcttccgggagtggagcaacgtgggcctggtggacttcttggggatggcctgtggattcacgaccgtctccgtggggattgtccttatacaggtgttcaaagagttcaatttcaaccttggggagatgaacaaatctaatatgaaaacagactagattgcaataggagcttggatggttcgaggaataggcattggaggtggtttctggccgtgattggatgtgaagtagaagaggtcctcgatcatggtgttagaattgactggatagtaacaggtggtctggtggatagcggggagcatggctcatcaccagagcagaggcccagccagccctctgcagcccaaacgtccccaacggttgcctggcaccatctctctctgatgagacgaatctcattttcatttccat

SEQ ID NO: 860 - DNA, 2107 bp, Homo sapiens
  CDS (141)..(1865)
tgaaactgtcaggttgccgtctaggtagcggttgtgcttgctgaggctgcacttgctgacactgcagctgcgacgcggctaagaggcgcagagcgaggagtcgggatttggtcgcgagcggcgacgagcatttgtgcagaatgtcatcagatgaggagaaatactcacttccagttgtgcaaaatgactccagtcgaggcagttctgtctcttcgaatcttcaggaagaatatgaagaactgcttcattatgctatagtgactccaaatattgaaccctgtgcttcacagtcatctcatcctaagggagaattggtgccagatgtcagaatttctacaattcatgatattcttcatagtcaaggaaataactctgaagtaagagaaactgcaatagaagttggaaaaggatgtgatttccatatttcaagtcattcaaagacagatgagtcatcaccagtgttatcgccaaggaagccttctcacccagtcatggattttttcagttcacatcttttagctgactcttcctcaccagcaacaaattctagtcatacagatgcccatgaaatacttgtgagcgattttcttgtttctgatgaaaaccttcagaagatggaaaatgtgcttgatctttggagttcaggtcttaagacaaacatcatatctgaactaagtaaatggagacttaattttattgactggcaccgaatggaaatgagaaaagagaaagaaaaacatgcagcacatttaaaacaactgtgtaatcagatcaatgaattgaaggagctgcaaaaaacctttgaaatctccattgggagaaaagatgaggtgatttctagcttgtctcatgccataggcaagcaaaaggaaaagatagagttgatgagaacattcttccactggcgaatcggccatgtcagagccagacaggatgtttatgaaggtaaactagctgaccagtactaccagagaactttactgaagaaagtctggaaagtctggcgttccgtagtgcaaaagcagtggaaagatgtggtagaaagagcttgtcaagcaagagctgaagaagtttgtatccagatttccaatgattatgaagccaaagttgctatgttatctggagctttggaaaatgcaaaagctgagattcaaagaatgcaacatgaaaaagagcactttgaagattccatgaaaaaagctttcatgaggggtgtatgtgcattaaatcttgaagccatgactatatttcaaaacagaaatgatgcagggatagactccacaaataataaaaaggaagagtatggtcctggtgttcaaggaaaagaacattctgctcatttggatccttcagctcctccgatgcccttaccagttacatcaccactgctgccatccccaccagccgccgtcggaggagccagcgcgactgccgttccctcagctgcttcgatgacttctaccagggctgcttccgcatcttctgttcacgttcctgtttctgctcttggtgcaggatctgcagctactgctgcatcagaagaaatgtatgtgccaagagttgtaacctctgcacaacagaaagcaggaagaactattacagcccggatcacaggaagatgtgattttgcttcaaaaaatagaattagcagcagtttagctataatgggagtttctcctcccatgagctcagttgttgtggaaaaacatcatccagtcacagtgcaaaccattcctcaagcaactgcagcaaaatatccccggaccattcatcctgaaagtagtacctcagcttccagatcacttggaaccagatcagctcacacccagtctctcacaagtgttcattccataaaagtggttgactaaagtgaatatgtccatagtggggtcttttaatccctctggtcttaccaagggttagaagtcttttggttttaacttttccatattgttagaacatcatggagacatcatgttcatctgttcaaaattacaagaggctttttcaagctctaccatgctttgtaactatatgtagaaattattttaatgttattttttatttaagcaattaagtaaaacttttttaaattaaaaaaaaaaaa

SEQ ID NO: 861 - DNA, 2227 bp, Homo sapiens
  CDS (6)..(2114)
ccgccatgccggaaccgcgcgggtcgtcgcagctgcgggtgaacgcggcgtttgccgcgcggtacaaccgctaccgggagcgcgaggaactgcagcggctgaaggatcgctacggggaccgagacagcagcagcgactccagctccgagtcggactcaagcgacgagcgcgtggaatttgatccccagcaggagcgggacttttacaaaacgctctccttgttgaagaagaaggacccccgcatttatcagaaagatgccaccttctataacagaacagcatcgtcatcagacagtgaggaggacccagaagccttggagaagcagaagaaagtgcggcccatgtacctgaaggactacgagaggaaggttatcttggagaaggcaggcaaatatgttgatgaggagaactcagacggggagacttccaatcacagactccaggagacatcgtcgcaaagttatgtggaggaacagaaacagctcaaggaaagcttccgggcatttgtggaggacagtgaggacgaggacggcgctggggagggcggctccagtttgctgcagaaacgtgccaaaaccaggcaggagaaggcccaggaggaggccgactacatcgagtggctgaagggacagaaagagattcggaacccagattccctgaaggaactgacgcatctcaaggaatactggaacgaccctgagttggatgaaggggagcggttcctgcgggattacatcctcaacaaacgctatgaggaggaggaagaggaggaggaagatgaagaggaaatggaggaagaggagggggtccacggtcccccagtccagctggctgtggacgactcctcagacgaaggggagctgtttctgaagaaacaggaggactttgaacagaagtacaatttccgtttcgaggagccggactcagcatcggtcaagacctacccacgcagcatcgcgtcctccgtgcgccgtaaggatgagcgcagaaaggagaagagggaagagactcgggagcgaaagaagagggagaaagcaaagaagcaggaacagctcaagcagctgaagaacctgaagaggaaggagattctggccaagctggagaagctgcggaaagtaacaggcaacgagatgctgggcctcgaggagggggaccttgaagacgacttcgaccctgcccagcacgaccagctcatgcagaagtgctttggggacgagtactacggggccgtggaggaggagaagccacaatttgaggaagaagaagggcttgaagacgactggaactgggacacgtgggacgggcctgagcaggagggagactggagccagcaggagctgcactgtgaggaccccaacttcaacatggacgccgactacgaccccagccagccgaggaagaaaaagcgcgaggcccccttgacgggcaagaagaagcgcaagtcgcccttcgccgcggccgtggggcaggagaagcccgtgtttgaacccggggacaagacgttcgaggagtacctggatgagtattaccggctggactacgaggacatcatcgacgacctgccctgtcgcttcaagtaccgcacagtggtgccctgtgactttggcctcagcactgaggagatcctcgctgctgacgataaggagctgaaccggtggtgctccctaaagaagacctgcatgtacaggtcagagcaggaggagctgcgggacaagcgggcgtacagccagaaggcccagaactcatggaaaaagcggcaggtcttcaagtcactctgccgagaagaggcagagacacctgcggaagccacagggaagccacagagagatgaagccggcccacagaggcagctgccagcccttgatggcagcttgatggggccggagagtcccccagcacaggaagaggaagcccctgtatcaccccacaagaagccagccccccagaagcggaggagggccaagaaggcacggctgctgggccccactgtgatgcttggtggatgcgagttcagccgccagagactgcaggcctttggcctcaaccccaaacggctgcacttccgccagctgggccggcagcggaggaaacaacaggggcccaagaacagctcctgagcaccagggagcaggcaggggcctcaggctcctctcctcaaatcaagccctggacaggtctcgcacccacaagtactatctgctgcagagatcctctcatctgtggccag

SEQ ID NO: 862 - DNA, 585 bp, Homo sapiens
  CDS (296)..(457)
aagagaaaataattcttctgtcaaaggaggttaaattttagttgatagagtacttaaatgcattactttattaggttatgtaagtggtcagtgcattccagtatgtgtcacaacagtgtagttcatattcatgataaaaatgaaactgtgataagacatgaaaattatattattaaaatgttcaattgtaatggtaatcatgagtatacttaattttatttatgtatagaatatttgtatttattttttggacatatatttatcactttgtcattttttttaaccaatttgagaaatgttagctgctgaattaatttgttgcccgagccttcatattttcttctttgctgccttctccctgtggcaatgtactgttctcacattaagccttttaaaaatgttccatactgtattagcatccttagaagggacagaactaagaaatacattgctcaaataatattttactttattgataatgacaaaaagaatattttttaaaccccatcaaaatagatttcaattgactgtttcccctacatcttttgagccacagtcgcccatcgaataagcaaatttgttttt

SEQ ID NO: 863 - DNA, 2105 bp, Homo sapiens
  CDS (405)..(1055)
cagcaggaaaaaatgaaagaaattaattctgaagaagagaaaattaatgatattacagtagaaattaataaaaccacagaaagggctcctgaaaattgtcatttggccaatgagataaaaccttctgacccaccattggataatcagatgaaacattcttttgattcagcatcaaataaggttcagctccccaacagcatagtattctcagtaaccagacatctaaaagcagtgataacagggagacaccacgaaatcattctttgcctaagtgtaattcccatttggagataacaattccaaaggacttgaaactaaaagaagcagagaaaactgatgaaaaacagttgattatagatgcaggacaaaaaagatttggagcagtttcttgtaatgtttgtggaatgctgtatacagcttcaaatccagaagatgaaacacagcatctgcttttccacaaccagtttataagtgctgttaaatatgtgggctggaagaaagaaagaattctggctgaataccctgatggcaggataataatggttcttcctgaagacccaaagtatgccctgaaaaaggttgacgagattagagagatggttgacaatgatttaggttttcaacaggctccactaatgtgctattccagaactaaaacacttctcttcatttccaatgacaaaaaagtagttggctgcctaattgcggaacatatccaatggggctacagagttatagaagagaaacttccagttatcaggtcagaagaagaaaaagtcagatttgaaaggcaaaaagcctggtgctgctcaacattaccagagcctgcaatctgcgggatcagtcgaatatgggtattcagcatgatgcgtcggaagaaaattgcttctcgcatgattgaatgcctaaggagtaactttatatatggctcatatttgagcaaagaagaaattgctttctcagatcccactcctgatggaaagctgtttgcaacacagtactgtggcactggtcaatttctggtatataattttattaatggacagaatagcacgtaaaacaaattcttgcctacaccactagaagacatctattgaagagaatggattggttgctgactttaaccaggaactagggccatttttattacaatgaactcaggactggcaacaaccatatggttgttccattttcataaaattggaaacaatgcagtaatagcttattgttttgttttttaaagaagatattttattatcttttacagaaatttatgattgatgtattttatctatagttatttagacatgtttacatgcagcagataattgttcatagtggactgaaaactaatgcaaggactatggtctcagtgataagtatattttgaagttcttaatatggaaatataccagtgtagcttggtactgtatttttttatattgatctgctgataccagtgataggcttaaagattgtattttcacagagtggaaaccaatttttttagttattgttcaaggagggtgcaatattaagtgttttggaatttgaagctaatttttaaaaggcctgaactatactttgaagaaacccctatagaaaaggaaagctccagctaaataggaagaattagaatattgagcttttttttcctgatttttctctttcctatctttgatggaaggaggaagtagaaagtggtaaagaattgaggctttccttcttggagagctgtaaatgacaagcattaggaaaggtaccctcctagattcattattctttcattctggtttcacttttaaaataaatggcaacttggcacacctaggctgttaacaaatctcaaagaggtttataaaaacgtatagaatacttggaagcaaagtatggatgactcggtatctgctttgttattcctcagaaatactgcactgagtatatgccctcattactggacttcattttgatacttgtctatccttcatagtgccctctacttttaaagggtttatatgttgaaaaactgctgtggccttttatgacctgtatataatgtagaataaaaataataaaatacttgatagctttttaaaaaaaaaaaa

SEQ ID NO: 864 - DNA, 2290 bp, Homo sapiens
  CDS (49)..(1662)
gcgctccgtcaccagggagtgcgggaatccgccgtttgcgctgaggcaatggcggcagctgcgccggtggccgcggacgacgatgagcggcggcggcggccgggggctgcactggaggactcccggtcccaggaaggggcaaatggtgaggccgagtcaggtgagctcagccggcttcgggctgagctggcaggcgccctggcagaaatggaaaccatgaaggctgtggcagaggtgagcgagagcacgaaggccgaggctgtggctgcggtgcagcggcagtgccaagaggaggtggcctcgctgcaggccatcctgaaagactccatcagcagctatgaagcccagatcaccgccctgaagcaggagcgacagcagcagcagcaggactgtgaggagaaggagcgggagctgggccgcctgaagcagctgctgtcccgggcctaccccctggactccctggagaagcagatggaaaaggcccacgaggactcggagaagctgcgggagatcgtactgcccatggaaaaggagatcgaggagctgaaggcgaagctgctgagggccgaggagctgattcaggagatccagagacgtccccggcatgccccttccctgcacggctccacggagttgctgcccctgtcccgggatccatcgcccccgctggagcctctggaggagctgagcggagatgggggtccagccgctgaggccttcgctcacaactgcgatgacagcgcctccatctcctccttctcccttggcggtggggtcggcagcagctcctccctgccccaaagccgccagggcctgagccctgaacaggaagagacggcctcgctggtgtctacgggcaccctggttcccgagggcatctacctgccccctcctggctaccagctcgtcccagacactcagtgggagcagctgcagacagagggccgacagctgcagaaggacctggagagcgtcagtcgcgagcgggacgagctccaagagggcctgagacggagcaatgaggactgtgccaagcagatgcaggtgctcctggcccaggtccagaactcagagcagctgctgcggaccctgcaagggaccgtgagccaggcccaggagcgggtgcagctgcagatggcggagctggtcaccacccacaagtgcctgcaccatgaggtaaagcggttgaatgaggaaaaccaagggctccgggccgagcagctgccatcctcagccccccagggctcgcagcaggagcagggcgaggaggaatcactgcccagctctgtgccagagctgcagcagctgctgtgctgcacgcggcaagaggcgagggcccggctgcaggcccaggagcacggggccgagcgcctgcggatcgagatcgtgacgctgcgggaggctctggaggaggagacagtggccagggccagcctggaggggcagctgagggtgcagcgggaggagacagaggtgctggaggcctccctgtgcagcctgaggacagagatggagcgggtgcagcaggaacagagcaaggcccagctcccagacctcctctcagaacagagggccaaggtgctgcggctgcaggcagagctggagaccagtgagcagtgcagagggatttcgtgcgactgtcccaggccctgcaggtgcgcctagagcggatccgccaggctgagaccctggagcaagtgcgcagcatcatggatgaggcgccactcacggacgtcagggacatcaaggacacctgaggggtcaggatatccccacccccaccctgggaaagacgcctttccccactcctgaaccatgaggcctcgctctggggtcttggatggcttttccaccgtccctgagactggggttgaggggactgacgggggccaccaccgccccgccctccagcgcctcctcccagggtggctgggcctcctgttctcaggggtcacacctgggtgaggggcccaagcccctcccggaaccaaaggtgcaggctcaggcctgcggctttctggctgctgtgctgcctcctgggctccagccctcccctgcccccagcccgtcccctgcccagggcacagcggagccatgggggctgggagtccccatcagaggcagtgaggtgggccccggccctgggacaggcagctgccttctggtctgcatgacactaagacgcttgtccacagcggcgacccagacctccaagcttgcacagaggcaaggccagacttttccgtcgtttattttcaataaataagcagctcagcgcaaaaaaaaaaaa

SEQ ID NO: 865 - DNA, 1456 bp, Homo sapiens
  CDS (477)..(821)
aagcttgaaagtaagttgcttccatgagcatggattacccagtagctactttttaatagagactgactaggtttacaacttctgggagctactctgggggctgaattcttccaaaaccgagaaaagccagtgcagtctgatttcttttgcttttgtcagtaatggaatcttttgtttttaaaatgtacaaacctataagtttaaacaggtttgtactgacaacctccttggcttatttgggggtggagcaattgttttattccccagtttcagtgcgttgcccacttcaaacatggtgtgtcctttggagctgtgacagaggtgcctgttctgacttagaacctctggaggaggaggggggtgccttggtctcgtgttactttgctgtgcctgtgctgagagaccatgtgcccgagcatctggttgaccggcatgaagtacatcagcctgtcttagcctgagctgctttgaagaccatggggtcttgtgtttccaacttcgaagtgctgatgtggacagtttgccaatgttctcttctattgcaagttcagccagactccatgactcatctgatcccttttatggccaaatcatccttcagagtagggaacactcagacattctgtgcatgttgttcccccaaagcatggtcatcacaaagtcctgagttctggtgtgtgctcccgcctcctgggtatacagagagaaggcaggaatcaggagttccagaagcatatacatgtggctaccccagcaacaagcgcatcctgtgctcagataagctgcatggttgggagtgttttttctcgcacgttgaggcttagtggagatgggcaccactgccatttgctcagaagaaggctggtctggtcctaactgcatcccacactgcccagatcattctagaataggttatttctgaatgttttatagaatttcttaataccatcctggtttggtcagccattcctttgattggaaaggtcagctggggccagtggtgcctcaggcaggcccacacaactggccacctcttcccgttaatgaccacagcagacagaatttgagcccagcacctaaaagtacaggaatttcacttcccaccaggacttgagcacataactctatgtctgatctaggaggctgggggaagagcctcccataaaatcacacctactctgtggtaagaataaaatcccacccacctgggacttggtaatttctccagacaggaaagctttagaaaacttgagtgaaatggagcaagcttgaaggagttagaatcttctgtgcttagggtttgctgctgctggtgagcttagaattttggggttgggaaaaagtggaaggcataagcatagaaatattttaggatattttaggatatgtgaataaagctagactcaaaccatcataataaacattttttttttggacaaaagataaaaaaaaaaaa

SEQ ID NO: 866 - DNA, 2452 bp, Homo sapiens
  CDS (14)..(1882)
agcgctggtggccatgctcttggagcactacggcctggcgggccagccctcgccgctgccgcgccccgcgccccccaggaggccgcaccctgcgccagggcccggagacagcaacatcttctggggcctgcagatatccgacattcacctgagcaggtttcgagatccaggcagagcggtagacttagagaaattctgttctgaaactattgacatcattcaaccagctctcgtcctagcaacaggagacctgacagatgccaaaacaaaggaacagttgggatccaggcagcatgaggtagaatggcaaacctaccagggtattctgaagaagacaagagtcatggaaaaaaccaagtggctggatatcaaaggaaatcatgatgcattcaatattccaagtctggacagcatcaagaattattacaggaaatattctgctgtacgtagagatggctctttccattatgtccacagtactccctttggcaactattcgttcatctgtgtagatgccactgtaaatccagggcctaagagaccctataatttctttggaattttagataagaaaaagatggaggagctcttattactggccaaggaaagcagtcggagcaaccatacaatttggtttggacactttacaacatccactattctttctccatcaccaggaatccggtcaataatgagttcggctatagcttatttgtgtggacatctccatacacttggtggactgatgcctgttttgcacactcgtcacttccagggcactttggaacttgaggtgggagactggaaggataataggaggtaccggatttttgcttttgatcacgacctctttagctttgcagatttgatctttgggaagtggcctgtggttcttatcaccaatcctaaatcactcctttatagttgtggtgaacatgaaccactagaaagacttcttcactcaacacacatcagagtcttggccttttccttatcctccattacttctgtcacagttaagattgatggagttcatttaggccaggctgttcatgtgtctggtcccattttcgtactgaagtggaatcctagaaactacagtagtgggacacataacatagaagtaatcgtccaggattctgctggaagaagtaagagtgttcaccacatattttctgttcaagagaataatcatctcagttttgatcccctggcatcatttattctccgtactgatcactacatcatggcccgggtcctttttgtgctgattgtgctgagccagctcaccattctcattatttttagatatcgaggatacccagagcttaaagaaccttcagggtttataaatctgacctcattttctcttcatgtcttgagcaaaataaacatcttctactattctgtgttgttgttgaccctgtatacagtgctgggtccatggttttttggtgaaatcattgatggcaaatttggttgctgcttttcctttgggatatttgttaatggacatttcctacaaggcagcataacatttataattggaattctccagctggcgttttttaacatccccttgatggcttacatgtgttggagcttgctgcagcggtgctttggtcacaacttcaggtctcatctccatcaaagaaaatacttgaaaattatgcctgttcacctacttatgctactgctgtacatctggcaggtttattcctgctactttctttatgcaacatacggcaccctagcttttttattctcccctttgcggacctggttgacactgctgacacctgttctcattcgttatgtgtggacactgaactccaccaagtttggaatcttcatggtgcagttaaaaagccacctgagctcctgaaggccatgtctcaccactggcagctgggcagaagcccagcctctgtgtctgtagcccaggcctctaccccagtagcaggtggagggccaggattggtgggtgagctttagggagcagctgctcgtttggagtcctggacgttggagggattacccactactgatacctgcagaatggactgcagaaaagtctcaaaaataatgcctttattccttccctccctaaggaggcaaagagttgatttacctttgtgaagagaaaacccttatctaggacatccacagggtagaggttgggtgtgtgtacgggagtgtctgaggcccagtgtgttttttagggttaccccatgtaaagcacttaccgctgtgcttggaattcagcagctgtcaaaggtgcaatttcaggggcagggaacctttgaggatctgggcccgaccctcactacccctgagatattagttcccaggcctgttttcccacaggattgtgggctctctgcttccttagtcggaagtgttttcaactaatcaaataaatgaatgaatgatgaataagaaaaaaaaaaaa

SEQ ID NO: 867 - DNA, 1236 bp, Homo sapiens
  CDS (113)..(1147)
tttcgtggaggggcaaggcgagtgtgtgtccttatcctatcaattggggcgcgggcctgtgagccagttggagttgcggcggcgggaacgattgggctgagcagaggacgacatgttgcttttcgtggagcaggtagcatctaaaggaactggtttaaatcctaatgccaaagtatggcaagaaattgctcctggaaatactgatgccaccccagtaactcatggaactgaaagctcttggcatgaaatagcagctacatcaggtgctcatcctgagggtaatgcagagctctcagaagatatatgtaaagaatatgaagtaatgtattcttcatcttgtgaaaccacaagaaatactacaggcattgaagaatcaactgatgggatgattttaggaccagaagatctgagttaccaaatatatgatgtttccggagaaagcaattcagcagtttctacagaagacctaaaagaatgtctgaagaaacaattagaattctgtttttcacgagaaaatttgtcaaaggatctttacttgatatctcaaatggatagtgatcagttcatcccaatttggacagttgccaacatggaagaaataaaaaagttgactacagaccctgatctaattcttgaagtgttaagatcttctcccatggtacaagttgatgagaagggtgagaaagtgagaccaagtcataagcgttgtattgtaattcttagagagattcctgaaacaacaccaatagaggaagtgaaaggtttgttcaaaagtgaaaactgccccaaagtgataagctgtgagtttgcacacaatagcaactggtatatcactttccagtcagacacagatgcacaacaggcttttaaatacttaagagaagaagttaaaacatttcagggcaagccaattatggcaaggataaaagccatcaatacattttttgctaagaatggttatcgattaatggattctagtatctatagtcaccccattcaaactcaagcacagtatgcctccccagtctttatgcagcctgtatataatcctcaccaacagtactcggtctatagtattgtgcctcagtcttggtctccaaatcctacaccttactttgaaacaccactggctccctttccccaatggtagttttgtgaatggctttaattcgccaggatcttataaaacaaatgctgctgctatgaatatgggtcgaccattccaaaaaaaaaaaa

SEQ ID NO: 868 - DNA, 1899 bp, Homo sapiens
  CDS (314)..(1174)
cagtggcgcggcggccggcgccaacgccaatgccgtggccctgggcggcctgccccccggcggcggctcgcacccgcagcactacggccgcctgcccgggaccatctggagctacacgcaggtgcggcgcacgggcggcggcggcgtggagaccgtgcagggccccggcgtgtcgtgggtgcaccccgacggcgtgggcgtgcagatcgacaccatcacgccggagatccgcgcgctctacaacgtgctggccaaggtgaagcgcgagcgcgacgagtataagcggaggtgggaggaggagctcgccaagcgcatgaaccttcagaccatggtggacacgctgcaggaggcagcacaggaggctgatgccatccaggaggagatgaatgagaagatcgagcggctcaaggccgagctggtggtgtttaaggggcttatgagtgaccccatgacagacctggacacaaagatccaagaaaaggccatgaaggtggacatggacatctgccgccgaatcgacatcacggccaagctgtgcgatgtcgcacagcagcggaactcagaagacgtgtccaagatcttccaggtggtccccaaaaagaaagagcgtaaggtggcttccgatgatgacatctctgagcaggacggggaggtgaaccggttctcggacgatgaggtcggctccatgaacatcaccgatgagatgaagcgcatgtttaaccagctgcgggagacctttgactttgacgacgactgtgacagcctgacgtgggaagagaatgaagacacgctgctgctctgggaggatttcaccaactgcaatccgaccatcgacctgcagggcgagcaagaggaaaacttgggcaacttgatccatgagaccgaatccttcttcaagacgagagacaaggagtaccaggaaacgataggtcagatcgagctcgagctggccacagccaaaagtgacatgaaccgacacctgcacgagtacatggagatgtgcagcatgaagcgaggcctggacgtgcagatggagacctgccgccggctcatcaaaggctccgcagacaggaattcaccgtcccccagctccgtggccagcagcgactcaggaagtacagatgagatccaggatgagttcgagcgcgaggcggatgtggagcccatggtcagctgatgactgaggccctgcgagcctggtggtcttggtgatggggccctgccacctctcctcatggggccaggaaggcccctcggagtggggttcgaagccacaccacacagactttctctgccctcccttctctggaggccctgagggactgctgcttccttccttccttccacaccaccaacgggtgccccgtctccatcccccacccacccaaggaatggtgctgtcaatttctattgttctccacattacaaatgcagacttctgtgcggactttgcagtgttaactgtgccttctcccttaagctgagccactttgagctccaaagaattattcctagcaggtgtttttatacagaactctaagctgagggccgggccaaccggccgtggtgtaatgtggtttctgccgtccgtcccacctgctcctctgattggccatgggctatgccctcccttcctcctgagccagcccagactcggcctggagcttggggtgctctgccaacccccaggaaggagccgcttgcctctgtgagctttctaggcctgggtagggaccaccccaattttctcactccctgaaggagagaaaggtggaaggaagggaaggaggacacattttaattttttggggggatcgagtggcaaagttgaagggacaaggcactgtgaggggaaggcagagcctcactgtgtttaaactactatgcaaaaaaaaaaaa

SEQ ID NO: 869 - DNA, 3457 bp, Homo sapiens
  CDS (267)..(3137)
cggaccggaattcccgggacgacgatttcgtgtgagaagcagagtacagcgagactagcattcactgctggccagtgcctgcctttttcaccacctctaatttcagcttcagcagttgcttggaactttggttctggcagcagcagcaacatcattaccgctagcggcagttttgtgccgaggcacctacacacctcccgtcctctctgccagatcgcgggcctgtcggtgtctgctcctacacgccaacgccggtgggcaggaccatgtctctggtaagccagaattcgcgccgccgccgccgccgcgttgcaaaggctactgcgcacaacagcagctggggcgaaatgcaggcccctaatgcccccggtctccccgctgatgtgccaggctcagacgtcccccagggtcccagcgattcccagatcctccagggcctctgcgcctctgagggcccaagcacctccgttctgcccacctccgctgagggcccaagcacctttgtgccgcccaccatctctgaggcctcaagcgcctccgggcagcccaccatctctgagggacctggcacctccgtgctgcccacccccagtgagggcctaagcacctccgggcctcccaccatctctaaggggctgtgcacctctgtgacgcttgccgcctctgagggccggaacacctccaggccgcccacttcctctgaggaacctagcacctccgtgccgcccaccgcctctgaggtaccgagcacctccctgccgcccacccctggtgagggaacgagcacctccgtgccgcccacagcctatgagggaccaagcacctccgtggtgcccacccctgatgagggaccaagcacctccgtgctgcctacacctggtgagggaccaggcacctccgtgccgctcgccgccactgagggcctgagcacctccgtgcaggccactcctgatgagggaccgagcacctccgtgccgcccaccgccactgagggcctaagcacccccgtgccacccacccgtgatgagggaccgagcacctccgtgccggccactcctggtgagggaccgagcacctccgtgctgcccgccgcctctgacggacaaagcatctccttggtgcccacccgcggtaagggatcaagcacctccgtgccccccaccgccaccgagggcctgagcacctccgtgcagcccactgctggtgagggatcgagcacctccgtgccgcccacccctggtgggggactgagcacctccgtgccgcccaccgccactgaggagttgagcacctccgtgccgcccactcccggtgagggaccaagcacttccgtactgccaatccccggtgagggactgagcacctctgtgccgcccaccgcctctgatggatcggacacctccgtgccgcccactcctggtgagggcgcaagcaccttagtgcagcccaccgcccctgacggaccgggaagctccgtgctgcctaaccctggtgagggcccgagcacattgtttagctctagtgcttctgtggaccggaacccctccaagtgttcccttgttttgccaagccctagggtaaccaaggcctccgtggactcagattctgagggtcctaagggtgcagaaggccctatagaattcgaggtcctgagagactgtgagagccccaactccattagtattatgggcctcaatacttcccgggttgcaattaccctgaagccccaagaccctatggaacagaacgtagctgagctgttgcagttcctgctggtgaaggatcagagcaagtaccctatccgggagtctgaaatgcgggaatatattgttaaagaatatcgcaaccagtttcctgagatactcaggcgagcagcagcccacctggagtgcatttttaggtttgaattgagagaacttgaccctgaggcacacacctacattctgttaaacaaactgggacctgtgccctttgaagggttagaagagagcccaaatgggccaaagatgggcctcctgatgatgattctaggccaaatattcctgaatggcaaccaagccaaggaggctgagatttgggaaatgctctggaggatgggggtgcagcgggaaaggaggctttccatttttgggaacccaaagagacttctgtctgtggagtttgtatggcagcgttacttagactacaggccagtaactgactgtaaaccagtggagtatgagtttttctggggcccaagatcccacctagaaaccaccaagatgaaaattctgaagttcatggcgaaaatatataacaaagatcctatggattggccagagaaatacaacgaagctctggaagaagatgctgccagagcctttgctgagggttggcaggctctccctcactttaggaggcccttttttgaggaagctgctgcagaggtaccatcccctgattcagaggtttccagctattcctcaaaatatgccccacattcatggcctgagtcaagattggagagcaaggcaaggaagctggtgcagttatttctgcttatggattcaactaagctgcctataccaaagaaaggaattctgtactacattggccgagagtgcagcaaagtgttccctgacctcctgaatcgtgctgcccgcaccctgaaccatgtctatgggacagaactagtggtacttgatcccaggaatcactcctatactctgtacaaccgaagggagatggaagaaactgaggagatcgtagacagtccaaacaggcctggcaacaactttttgatgcaggtcctaagcttcatctttattatgggcaaccatgccagggagtctgcagtctgggcctttctgcggggcttaggggttcaagctgggagaaagcatgtgattacctgcagatacttgagtcagcgctatatagacagtttacgggttcctgacagtgatccagtgcaatatgagtttgtatggggtcctagagcccgtttggaaacctctaagatgaaagccttgcgatatgtggccagaatccacagaaaggaaccacaggactggccacagcagtacagggaggcaatggaagatgaggccaatagagctgatgttgggcacaggcaaatctttgttcacaacttcaggtaaaggaatgcatggcagtcagaggggccttgcaaggaggggcctttgagcctcagttctcatgtattggggggtgggggtgggtacatattgtatttggtatttgtgttccagttatatttatgtcttttcatatttagttctggtgtggggtctggaaatgtttcaactgttttaatatattgtctgattgggtaaatgtgattgaccacttgctgtctctgttgtattttggtatgagttttgatagctctataaaatgttttggaaatctttccatcttgttgcattatctagaaaagaatatagcatatagctat

SEQ ID NO: 870 - DNA, 3156 bp, Homo sapiens
  CDS (478)..(2565)
atgagctacttcgcccacccggaggagctggccctggagcatcagccaccccaggccgggctccccccactggccttgtctcagctctttaacccggatgcctgtgggcgccgggtgcagacagtggtgctgtatgggacagtgggcacaggcaagagcacgctggtgcgcaagatggttctggactggtgttatgggcggctgccggcattcgagctgctcatccccttctcctgtgaggacgtgtcatccgtgggccgtgccccagcctccatgtgccaacttgtggcccagcgctacacgcccctgaaggaggttctgcccctgatggctgctgctgggtcccacctcctctttgtgctccatggcttagagcatctcaacctcgacttccggctggcaggcacgggactttgtagtgacccggaggaaccgcaggaaccagctgctatcatcgtcaacctgctgcgcaaatacatgctgcctcaggccagcattctggtgaccactcggccctctgccattggccgtatccccagcaagtacgtgggccgctatggtgagatctgcggtttctctgataccaacctgcagaagctctacttccagctccgcctcaaccagccgtactgcgggtatgccgttggcggttcacgtgtctctgccacaccagctcagcgtgaccacctggtgcagatgctctcccggaacctggaggggcaccaccagatagccgctgcctgcttcctgccgtcctattgctggctcgtttgtgccaccttgcacttcctgcatgcccccacgcctgctgggcagacccttacaagcatctataccagcttcctgcgcctcaacttcagcggggaaaccctggacagcactgacccctccaatttgtccctgatggcctatgcagcccgaaccatgggcaagttggcctatgagggggtgtcctcccgcaagacctacttctctgaagaggatgtctgtggctgcctggaggctggcatcaggacggaggaggagtttcagctgctgcacatcttccgtcgggatgccctgaggtttttcctggccccatgtgtggagccagggcgtgcaggcaccttcgtgttcaccgtgcccgccatgcaggaatacctggctgccctctacattgtgctgggtttgcgcaagacgaccctgcaaaaggtgggcaaggaagtggctgagctcgtgggccgtgttggggaggacgtcagcctggtactgggcatcatggccaagctgctgcctctgcgggctctgcctctgctcttcaacctgatcaaggtggttccacgagtgtttgggcgcatggtgggtaaaagccgggaggcggtggctcaggccatggtgctggagatgtttcgagaggaggactactacaacgatgatgttctggaccagatgggcgccagtatcctgggcgtggagggcccccggcgccacccagatgagccccctgaggatgaagtcttcgagctcttccccatgttcatgggggggcttctctctgcccacaaccgagctgtgctagctcagcttggctgccccatcaagaacctggatgccctggagaatgcccaggccatcaagaagaagctgggcaagctgggccggcaggtgctgcccccatcagagctccttgaccacctcttcttccactatgagttccagaaccagcgcttctccgctgaggtgctcagctccctgcgtcagctcaacctggcaggtgtgcgcatgacaccagtcaagtgcacagtggtggcagctgtgctgggcagcggaaggcatgccctggatgaggtgaacttggcctcctgccagctagatcctgctgggctgcgcacactcctgcctgtcttcctgcgtgcccggaagctgggcttgcaactcaacagcctgggccctgaggcctgcaaggacctccgagacctgttgctgcatgaccagtgccaaattaccacactgcggctgtccaacaacccgctgacggaggcaggtgttgccgtgctaatggaggggctggcaggaaacacctcagtgacgcacctgtccctgctgcacacgggccttggggacgaaggcctggagctgctggctgcccagctggaccgcaaccggcagctgcaggagctgaacgtggcgtacaacggtgctggtgacacagcggccctggccctggccagagctgcccgggagcacccttccctggaactgctacacctctacttcaatgagctgagctcagagggccgccaggtcttgcgagacttggggggtgctgctgaaggtggtgcccgggtggtggtgtcactgacagaggggacggcggtgtcagaatactggtcagtgatcctcagtgaagtccagcggaacctcaatagctgggatcgggcccgggttcagcgacaccttgagctcctactgcgggatctggaagatagccggggtgccacccttaatccttggcgcaaggcccagctgctgcgagtggagggcgaggtcagggccctcctggagcagctgggaagctctggaagctgagacactggcggcaggcacctagctatgtgaccactggccctaaaccttttccctctgtggcctcctggcttgcactgctccctctagaaagattccttcaggtctggaggcagaggaatgggcatagctgagccagttgccctcctagggcatgtttgaccaggactgagtctggaatctccaagttaaagatggtgaatcaatgcttcgggcttggagatggaacatgcctcctctccattcagctagaaggaccaaagcatgtggcatttggatggccagagtgccctgaagcaccactaccaaccttgcctccccctcctctcaaagagcctctgattgtgtcaccaaggggctcacatcttatgtctgccatgccaggggtgtcgccatccagatgtgttggaagcttcccctcctgccttatgctcacctgtggacaccgaggatgccctcacattggtgctttctcctcatcctcatgccccctttgccacaatggtatgatggcttggtagcccctcgaggcagatgcacctgacttgctgctattaaaaagccgtgtgccttctaccaaaaaaaaaaaaa

SEQ ID NO: 871 - DNA, 2903 bp, Homo sapiens
  CDS (93)..(1055)
aaggatccttaattaaataatcccccccccccccggccgcggcgggcggctgcgaggagcggccggcgggcggcggcggccggcgggcggcgatggcggcggcggaggccggtggcgacgacgcccgctgcgtgcggctgagcgccgagcgggcacaggcgctgctggccgacgtggacacgctgctgttcgactgcgacggcgtgctgtggcgcggggagaccgccgtgcctggcgcgcccgaggccctgcgggcgctgcgagcccgcggcaagcgcctgggcttcatcaccaacaacagcagcaagacccgcgctgcctacgccgagaagctgcggcgcctgggcttcggcggccccgcggggcccggcgccagcctggaggtcttcggcacggcctactgcaccgcgctctacctgcgccagcgcctggccggcgcccccgcgcccaaggcctacgtgctgggcagcccagccctggccgcggagctggaggccgtgggcgtcgccagcgtgggcgtggggcccgagccactgcagggcgagggtcccggcgactggctgcacgcgccgctggagcccgacgtgcgcgcggtggtggtgggctttgacccgcacttcagctacatgaagctcaccaaggccctgcgctacctgcagcagcccggctgcctgctcgtgggcaccaacatggacaaccggcttccgcttgagaacggccgcttcatcgcgggtaccgggtgtctggtccgagccgtggagatggccgcccagcgccaggccgacatcatcgggaagcccagccgcttcattttcgactgcgtgtcccaggaatacggcatcaaccccgagcgcaccgtcatggtgggagaccgcctggacacagacatcctcctaggcgccacctgtggcctgaagaccatcctgaccctcaccggagtctccactctaggggatgtgaagaataatcaggaaagtgactgcgtgtctaagaagaaaatggtccctgacttctatgttgacagcatagccgaccttttgcctgcccttcaaggttaaagattgagtgtctttaatctgcagaataaaaaaaaagaaattgaaaaccagttacccaaattaataggtggggcttaagcatctgctcggctaagtggcttcaaagagtgtaattggagttaagcaaaggcattcattgttaaccttgtaagtacacgtttgggggacgattttgtttacagatgcttgtaatcgaagatgcacttttaggcttggaaggcattgtgggctgggttctgggccttgggtggggttggcaggggcaggctctgcacctgtccgggattcaggtaaccagggcctgccgatgggactgaggcgggtctaggggtgtgtgtcctgtattttattgaaaaactcattcagggatccagcccctcagggggcagagggactgattattctgactgttgggagaggcttgcatggaccagagccccatcagtatgactgaaagtccagcggagccttctgtgtccctgtgcctcccagcagggtgggagtggaggaggcggctgctcccaggtggcatctccctgcccttgggtgcaaagtgctgccctcaccactctcccacctcccctacttccttgaaaaccactctgatgtcacaactgagtgtctgttccgtttcagatacccagggctgctgcccagttctgtaaacgcagcccagctaaagctctgctgtctcaagtgtgcatttatacccaggtgatttggacggagcagctaccatggcgtggacgccttcactgaactccgggctgcagtgcagggagctcagagcagtgctgctaccaaacagtttttaactttgaacaactgtgtcaggcaatggatttgaattttaagtgtattaatagctgtgctctgtgtcgtaggcaaaattccactgaaggagcctctgtgccctgcagccggcagcgcggctgaagcatgtgttggccaaggaatgcctgtcatccaggtgccctgcagccagcagcgcggctcaagcatgtgttggccaaggaatgcctgtcagtcatccagggctctgggaggggacgagagttatgtccccaagaacaggaagtcctttacaaagcatccagtctcttcctgtcctccccttccctaggctggggtaggggttagagactggtggcccaggaggtcacctgccttgccctggattccctcttcagtggccagcaggacttggcagggccaccagctcgccaaggttctgggcggggctccagcctctcctgcctgctccttggctctgctgacctttcacaggcctgacagcagactcagcagggccatcccgggatgctgcaccttctggctggctccctaccagcgcctttccctgtacctggcagcttctctcttggccccacagtcacagcactccacttggtcacaaagacttcagagcaataagaggcgtcctgagccttcagcacctcccaggcctgggatatcgggttcagagggtgctgcagagcagcatgagggtggctccacccatgaggctggtgacactgacgctggcttggctaagttggctcaagccgggtctggcctgacagggtgcagtcacaccaggagcgcatggcagatgcagcctcagtgatgcctctcttgccgggtaggggctgggagtccccgtgcaccctgtctctggcccatgaggggctgcagcactgtgggcgccagagcacagattaaactctcaaacccacactggctcatgtgaccttgctctcaccttgcattggcccgggggatgccgtctcaccacgggagggaggactcatagtatatgggtatctgaggcctccactccatacg

SEQ ID NO: 872 - DNA, 2496 bp, Homo sapiens
  CDS (72)..(1829)
gtgctggggaaagctcctccgtgcagcagcagaagaaagtcctgtctggccgagaggagcagctgcaggtgatggagaaggccacacaggctggtggcccaaaccccacaggcaggcggagagactccggggccggagctgcggcgctggcccgaccaacccctgcgccccctgcaccccaacccggggcctggggcgcgcgggaggtggacgaagcggtaggtcccgggttcccgcgaggtgggcggggagccgcagcgccggggctcgtcagcagagggcgccggccccgggacgaggtgcgcatgcgtcctgggggcgctttccggcagcgtggcggaaccagccacttcgtttcgcgccgtttagcgacacctgcgcgcggcggcagtgcggccgtcatggcgtcgcccttcagcggggcgctgcagctgacggacctggatgacttcatcgggccgtctcaggagtgcatcaagcctgtcaaagtggaaaaaagggcgggaagtggcgtggccaagattcgcattgaagatgacgggagctacttccaaattaaccaagacggcgggacccggaggctggagaaggccaaggtctcgctaaacgactgcctggcgtgcagcggctgcatcacctccgcagagaccgtgcttatcacccagcagagccacgaggagctgaagaaggttctagatgctaacaagatggcggcacccagtcagcagaggctggttgtagtttcggtctcaccacagtctagagcatcgctggctgcacggtttcagctgaatcctacagatactgccaggaaattaacctcattctttaaaaaaataggggtgcacttcgtcttcgacaccgccttctcaaggcacttcagcctcctggagagccagcgagagtttgtgcggcgattccgaggacaggccgactgcagacaggcgctgcccctgctggcctctgcctgcccaggctggatctgctatgccgagaagactcacggcagcttcatcctcccccacatcagcaccgcccggtccccgcagcaggtcatgggctccctggtcaaggacttcttcgcccagcagcagcacttgacccctgacaagatctaccacgtcacagtgatgccctgctatgacaaaaagctggaagcctccagacccgactttttcaaccaggagcaccagacacgggatgtggactgtgtcctcacaacaggagaagttttcaggttgctggaggaagagggcgtctccctccccgacctggaaccagcccctctggacagcctgtgcagcggtgcctctgcagaggagcccaccagccatcggggagggggctcggggggctacctggagcacgtgttccggcacgcggcccgagagctctttggaatccatgtggctgaggttacctacaaacccctgaggaacaaagacttccaggaggtgacactggagaaggagggccaggtgctgctgcacttcgcaatggcgtacggcttccgcaacatccagaacctggtgcagaggctcaaacgagggcgctgcccctaccactacgtggaggtcatggcctgcccctcaggctgcctgaacggcgggggccagctccaggccccagacaggcccagcagagagctcctccagcacgtggagagactgtacggcatggtccgggctgaggcgcccgaggacgcgcctggggttcaggagctgtacacacactggctgcagggcacggactcggagtgtgcaggtcgcttgctgcatacgcagtaccacgccgtggagaaggccagcactggcctgggcatccggtggtaggggctgcaggaccaggactcccaggaggccgtgtccatgtgtgacagcagaaccacatgccccaagaccccagggcttcccccaaaattctgagtgagctgcagggtgtgctgggacccgagtaggagctaggactagccaggacccgcagccgcctcgtcacctccagttgggtgcctctgggttcccactggctctgcccaggtggggtggggtggcccaggcagcagaaggttccctgaggtcccagagcctgttccgttggccctgggccgaggcccacaggtgctgcccttgctgctgctggtcgggcacccaagtgcgtgaggggcttcagcctgtcccggggttgcctgaggcagagcaagacgggttctcacccctgacttctggaggcttcccttgaagctctgtgcaaaaggtgggagacagagctggacctgcaggggtggtcccgccacaaccctgcgtgtggaccctggcaggggggggtgccaggcccctggaaagcaggggttaccgttacgaggctgtggtccggggcaagccaagtacgaagcagcagccatcgcgggctgcatcatcccccagccaggtccccaccaggcctgtctcccagcgtttgtctaataaacgcacccctcctaaaacaaaaaaaaaaaaa

SEQ ID NO: 873 - DNA, 1642 bp, Homo sapiens
  CDS (52)..(1233)
cacatccacctccagcagcttacctgcttttccattacctgctccagcaccatgtcttacagttgttgcctgcccagcctgggctgccgcaccagctgctcctcccggccctgcgtgccccccagctgccacggctacaccctgcctggggcctgcaacatccccgccaatgtgagcaactgcaactggttctgtgagggctccttcaatggcagcgagaaggagactatgcagttcctgaacgaccgcctggccagctacctggagaaggtgcgtcagctggagcgggacaacgcggagctggagaaactcatccaggagcggtcccagcagcaggagcccttgctgtgccccagctaccagtcctacttcaagaccattgaggagctccagcagaagattctgtgtgccaaggctgagaatgccaggctggtggtgaacattgacaatgccaagctggcctctgacgacttcagaagcaggtaccagacggagcagtccctgaggctgttggtggagtcggacatcaacagcatacgcaggatcctggatgagctgaccctctgcaagtctgacctggagtcccaggtggagtccctgagggaggagctgatctgcttgaagaagaaccatgaggaggaggttaacaccctgcgctcccagcttggagaccgcctcaacgtggaggtggacactgcccccactgtggacctgaaccaggtcctgaacgagaccaggagtcagtatgaggctctggtggaaactaaccgcagggaagtggagcaatggttcgccacgcagaccgaggagctgaacaagcaggtggtatccagctcagagcagctgcagtcctgccaggcggagatcatcgagctgagacgcacagtcaacgccctggagatcgagctgcaggcccagcacaacctgcgagactctctggaaaacacgctgacggagagcgaggcccactacagctcccagctgtcccaggtgcagagcctgatcaccaacgtggagtctcagctggcagagatccgctgtgacctggagcggcagaaccaggagtaccaggtgctgctggacgtgcgtgcccggctggagtgtgagatcaacacgtaccggagcctcctggagagtgaggactgcaagctcccctgcaacccatgcgccaccaccaatgctagtggcaactcctgtggaccctgtggcacctctcaaaagggttgctgtaattgaaaagcttgtatcctctttgaagacatctacaaagccatttagatcaaccacaggaaggatcctcaagtcctgacttttctggagctcagctgacatcaagaaacctcatcttgcctctatgttatttctagaatgctgaaaagctttcctgacccaagcaaagacacacatcatcaacttccaatgtctggacaactccttcctgttgagggtcgagcctgtttgtttctaaagatgttcagctccctgtaatctgagctccagttactacttaaggtgtttcctgaacgtactactgcatttcctgttttccttttttctttggcattctctggaatgcaaggaggagacttcatttacttcccaataaacttcatttctctggcataataaaaaaaaaaaaaaa

SEQ ID NO: 874 - DNA, 1058 bp, Homo sapiens
  CDS (54)..(593)
cacctccctctcacctgctcctctacctgctccaccctcaacccaccagaaccatgggctgctgtggctgctccggctgtgggggctgtggctccggctgtgggggctgtggctctggctgtgggggatgtggctccagctgctctgtgcccgtctgctgctgcaagcccgtgtgctgctgtgtgccagcctgttcctgctccagctgtggctcctgtgggggctccaagggaggctgtggctcctgtgggggctccaaggggggctgtggctcttgtgggggttctaaggggggctgtggttcttgtggctgctcccagtgcagctgctataagccctgctgctgctcctcaggctgtgggtcatcctgctgccagtccagctgctgtaagccctgctgctgccagtccagctgctgtaagccctgctgctgccagtccagctgctgtaagccctgctgctgccagtccagctgctgtaagccctgctgctgttcctcaggctgtgggtcatcctgctgccagtccagttgctgcaatccctgctgctcccagtctagctgctgtgtccccgtgtgctgccagtgtaagatctgaggctctggactcaggtctcatgtgagtcctgctaaccccattttccgaagctgtgacctgtccttcatcgttgagccccaaaccactgctcagggtccattcctcactataagatgaagccatatctgcctgccttttcctaaggagagtccaccctaattaatgtccattccctcctaacaaattctcttcccaagtcaactgcaactgcggctgaatcacccctcacccgctagccttgcctttgcttgtgtattcagaggcctgagctcctgaacccacttgaagtcctgtcttttccagctggagcagctgggcatgagtgtcccacctgcaacaaggtgggcgtttaagaggcttccttggagtggctttgcctgtccaacactctgctttatcttaaatgaaaagttgcaaactaataaaaataccatgccgacaaactgaaaaaaaaaaaaaaaa

SEQ ID NO: 875 - DNA, 1063 bp, Homo sapiens
  CDS (2)..(802)
gatggctccggccgcggaccgagagggctactggggccccacgacctccacgctggactggtgcgaggagaactactccgtgacctggtacatcgccgagttctggaatacagtgagtaacctgatcatgattatacctccaatgttcggtgcaattcagagtgttagagacggtctggaaaagcggtacattgcttcttatttagcactcacagtggtaggaatgggatcctggtgcttccacatgactctgaaatatgaaatgcagctattggatgaactcccaatgatatacagctgttgcatatttgtgtactgcatgtttgaatgtttcaagatcaagaactcagtaaactaccatctgctttttaccttagttctattcagtttaatagtaaccacagtttaccttaaggtaaaagagccaatattccatcaggtcatgtatggaatgttggtctttacattagtacttcgatctatttatattgttacatgggtttatccatggcttagaggactgggttatacatcattgggtatatttttattgggatttttattttggaatatagataacatattttgtgagtcactgaggaactttcgaaagaaggtaccacctatcataggtattaccacacaatttcatgcatggtggcatattttaactggccttggttcctatcttcacatccttttcagtttgtatacaagaacactttacctgagatataggccaaaagtgaagtttctctttggaatctggccagtgatcctgtttgagcctctcaggaagcattgatgaatcattccaccaagaaaacaaacaagcacctaccatagacctggcagaataaataaggaaatccttaaagatctacaagttcaaatatgtcatgaccatcacagcagaggagtgactttctgactaatgctgccacccacacagagaataaggagtagggcctgctgggtgtttagctcatggctttatcttatttgtccccctcctcctttcacgctccagtttataaagaaacagagatgaaaaaaaaaaaaa

SEQ ID NO: 876 - DNA, 583 bp, Homo sapiens
  CDS (100)..(423)
cggaggtgaaggacgtccttccccaggagccgactggccaatcacaggcaggaagatgaaggttctgtgggctgcgttgctggtcacattcctggcaggatgccaggccaaggtggagcaagcggtggagacagagccggagcccgagctgcgccagcagaccgagtggcacgccgtccgggtgggcctagcagtcgctccatttatcgcttgagatctccagccttaccgcggctcgaaatggaccccaactgctcctgcaccactggtgtctcctgcgcctgcaccggctcctgcaagtgcaaagagtgcaaatgcacctcctgcaagaagagctgctgctcctgctgccccgtgggctgtgccaagtgtgcccacggctgtgtctgcaaagggacgttggagaactgcagctgctgtgcctgatgtgggaacagctcttctcccagatgttaatagaacaagctgcacaacctggattttttttcaatacgatactgagccatttgctgcatttctttttatgttaaatatgtgagtgacaataaaacaattttgacttgaatcttaaaaaaaaaaaaaa

SEQ ID NO: 877 - DNA, 2082 bp, Homo sapiens
  CDS (67)..(2079)
ctctggtagctctccttgtctggttgttttgaagaaagaagagtagaagaaaaagttgagtaaatcatgtcggagttactggacctttcttttctgtctgaggaggaaaaggatttgattctcagtgttctacagcgagatgaagaggtccggaaagcagatgagaaaaggattaggcgactaaagaatgagttactggagataaaaaggaaaggggccaagaggggcagccaacactacagtgatcggacctgtgcccggtgccaggagagcctgggccgtttgagtcccaaaaccaatacttgtcggggttgtaatcacctggtgtgtcgggactgccgcatacaggaaagcaatggtacctggaggtgcaaggtgtgcgccaaggaaatagagttgaagaaagcaactggggactggttttatgaccagaaagtgaatcgctttgcttaccgcacaggtagtgagataatcaggatgtccctgcgccacaaacctgcagtgagtaaaagagagacagtgggacagtccctccttcatcagacacagatgggtgacatctggccaggaagaaagatcattcaggagcggcagaaggagcccagtgtgctatttgaagtgccaaagctgaaaagtggaaagagtgcattggaagctgagagtgagagtctggatagcttcacagctgactcggatagcacctccaggagagactctctggataaatctggcctctttccagaatggaagaagatgtctgctcccaaatctcaagtagaaaaggaaactcagcctggaggtcaaaatgtggtatttgtggatgagggtgagatgatatttaagaagaacaccagaaaaatcctcaggccttcagagtacactaaatctgtgatagatcttcgcccagaagatgtggtacatgaaagtggctccttgggagacagaagcaaatccgtcccaggcctcaatgtggatatggaagaggaagaagaagaagaagacattgaccacctagtgaagttacatcgccagaagctagccagaagtagcatgcaaagtggctcctccatgagtacgatcggcagcatgatgagcatctacagtgaagctggtgatttcgggaacatctttgtgactggcaggattgccttttccctgaagtatgagcagcaaacccagagtctggttgtccatgtgaaggagtgccatcagctggcctatgctgatgaagccaagaagcgctctaacccatatgtgaagacttaccttctgcctgacaagtcccgccaaggaaaaagaaaaaccagcatcaagcgggacactgttaatccactatatgatgagacgctgaggtatgagatcccagaatctctcctggcccagaggaccctgcagttctcagtttggcatcatggtcgttttggcagaaacactttccttggagaggcagagatccagatggattcctggaagcttgataagaaactggatcattgcctccctttacatggaaagatcagtgctgagtccccgactggcttgccatcacacaaaggcgagttggtggtttcattgaaatacatcccagcctccaaaacccctgttggaggtgaccggaaaaagagtaaaggtggggaagggggagagctccaggtgtggatcaaagaagccaagaacttgacggctgccaaagcaggagggacttcagacagctttgtcaagggatacctccttcccatgaggaacaaggccagtaaacgtaaaactcctgtgatgaagaagaccctgaatcctcactacaaccatacatttgtctacaatggtgtgaggctggaagatctacagcatatgtgcctggaactgactgtgtgggaccgggagcccctggccagcaatgacttcctgggaggggtcaggctgggtgttggcactgggatcagtaatggggaagtggtggactggatggactcgactggggaagaagtgagcctgtggcagaagatgcgacagtacccagggtcttgggcagaagggactctgcagctccgttcctcaatggccaagcagaagctgggtttatga

SEQ ID NO: 878 - DNA, 1455 bp, Homo sapiens
  CDS (4)..(564)
cggatgctgacgctctcttcctgtctttgtggctccggaaaggcgtttgggatgccaacgatgaggctgctgtcatttgtggtgttggctctatttgctgtcactcaagcagaggaaggagccaggcttttggcttccaaatcactgctgaacagatacgccggggagggacgagacctgaccttgcagtacaacatctacaatgttggctcaagtgctgcattagacgtggaactatctgatgattccttccctccagaagactttggcattgtgtctggaatgctcaatgtcaaatgggaccggattgcccctgctagcaatgtctcccacactgtggtcctgcgccctctcaaggctggttatttcaacttcacctcggcaacaattacttacctggcccaggaggatgggcccgttgtgattggctctaccagtgcacctggacagggaggaatcctggctcagcgggagtttgacaggcgattctcccctcattttctggactgggcagcctttggggtcatgacccttccctccatcggcatccccctgctattgtggtaactccagcaagaggaaatatgacactcccaaaacgaagaagactgattggggtcaaggctctttccaagaatcagggtcttccagaaacagggttcagaaccagggtcataagcgatcttcttgatcgggactatgcggtaagctgtgcccatgaaggcgcactgtgggaacgtgctgggcacaagaatgaaggacgtgacgccacgttgagttccacccgtgtcccccccttcgaagttgcgagcccacaccacaagccaccaaagcatgcaacaacacaggagcgcagagcagcaccagcgacacgagaagcgccaagacgcagaagcccgcccgacaacgggcgagcgcagccggcccagcgccggaggcgagcaccccgccacgcgcagcacgcgagcaaaccaagcacccagagagcaccgagcacaggggaccacgagacgacggacgagccagcgagcaggccgacggagcatacggcgcgagtagcggagcacgcagcgagacgcggaccgcccgaaggggcacgcacgccacgacaccgacaaggaaacggagacaacaccccgcacccaccaaacgagacacaaagcggcaggacgcagagcgacaagaccggcgcagcagcaacacaccaaaccgagcacgacacgcagaaggacaacagaggaaggacagggcggtgagagtgcgccgacaaagacgagatgccgcgacgcggacgaagcgagcgagccagcgaacacatgaaggcacgcagggacaacgagccgagacgacgcagaaaacgaccgagagaccaggcccgacgcacacacaacaaagcgaagcgacacaccaacacagcgcaagcagaagccacagccacagacgagcccagaagac

SEQ ID NO: 879 - DNA, 2506 bp, Homo sapiens
  CDS (481)..(2154)
cgcggacgtggaagaacctcgtctgcggaggaaaaggtgccgagtcaatccccatacacagccgccgccattgcctcgagtccttgtgtctgactgtctgttcctgctgctgtatgacacagcacctcgaggcaaggaaataagaaaactgcctctgatccaagcagagaaggtctgcctgtagatctgctgtagggcttgtcaccattggaagcaaggtcctacttcagtggcagatctggtggccttggagtggctgaagaccaccaccctccacagggctgggcccatgcacagccatccttccctaccttgagtgagcttcctctgcatgttttctatatcactggcagagcctgtagttggaaaggggacagagtgactactggactttgtgtgaaaacaccaaccgggacaaaacttcagtcaaggctgagacgggtgggggtatataacttgtccttacgttaaacttggaacatggttgactctgggacagaagcaagggctagaggaaaggctgaggctggcctgcaagatggaatcagtggtcctgccactgctagagtgaatggtaaaacccaggccgaggcagtggctgaggcagaactgaaaacagaatcagtgacccaggccaaagctggtgatggagcaatgaccaggacacatacagtgacctacagggaggctatggctgtgacaagggaagtgatcaaggtggaagatacaactaagactagagtcatggttgagactaagacaaaacccctggcagaacgcagtatagtgccacaaaccaagtcaaaggccatgcctatgtctagggtcagtactgtaaccaagtctgaagtcaaggttgttgctgtcattgaggcaaatattaggtcctatgccaagtcacatgataaggccaatactgggtccagacctgacagaagggaagagaccagcattgggatgaaatccagtgatgaggatgaagaaaatatatgctcctggttctggactggagaagagcctagtgtagggtcctggttctggcctgaagaagagacctctcttcaagtttataagcccctacctaagatccaggaaaagcccaagcccacacacaaacccacacttactataaaacaaaaggtaatagcatggtcaagggccaggtatattgtcctagttccagttgaaggaggggagcaatccttgcctccagaaggaaactggaccctggttgagaccttgattgaaactcctctggggattcgacctttgaccaagatcccaccttatcatgggccttattaccagaccttagctgagatcaaaaaacagattaggcaaagggaaaagtatgggcctaatccgaaggcctgccactgcaaatcacgtggctttagtttagagcctaaagagtttgataaacttgttgccctccttaagttaactaaggatcctttcattcatgaaatagctacaatgataatgggcatcagtcctgcttatccatttactcaagatataattcatgatgtaggtattactgttatgattgaaaacttggtcaataatcccaatgttaaagaacaccctggagctttaagtatggtggatgacagctctgagtcttccgaagaaccaaaatcaggggagtcatatatacatcaagtttgtaaaggcataatctcttgccccttgaactcccctgtgcagctggctggactgaaattactagggcacttgagtataaaatttgaagatcactatgtgattaccagttatattccagatttcctcaccttgttaaacaagggaagtgtcaaaaccaagttttatgttttaaaagtgttttcgtgtttgtctaaaaatcacgccaatacaagagaattgatcagtgccaaagtactgtcatcattggttgcaccctttaacaagaatgagtcaaaggccaatattcttaatattattgaaatatttgagaatataaattttcagttcaaaacaaaggcaaagctatttaccaaggaaaagttcactaaatctgagcttatttcaatattccaggaagcaaaacagtttggtcagaaactccaagacttagcagagcacagtgatcccgaagtgagagataaagtcatacgattaatactaaaactctgaatacccctctgttctcataaagcctcaaacagttttttggagttgcaatatgaaaccaatgcatattgtaattataaattcaatacttatgttttccatgttgattgagggaggcaattttatggataccaattaatcttgagatcctgaacatgtgctgatttttattgtgctatatagtatataaattgagatatttttggtatttctgcaacgtgacctgataatgaatctattcatcctgagtaagctatacttctgtgctttatattgatatgtgtattcttttgagattttatttacatgttgttaataaagttgcatgctaaaactggtgaaaaaaaaaaaa

SEQ ID NO: 880 - DNA, 2148 bp, Homo sapiens
  CDS (71)..(1957)
  misc_feature (1)...(2148): n = a,t,c or g
tgcggtgagaggaacgctgaattgccgaagagaattggctgcgcttccttgtttgtgagctanaatgagaatggcgatcagtccacgaagcgatgcaactttctccagtcagaaatcaacaccttcagagagtcctcgaacaaagaaatttccactaactgaagaggaaatattttatatgaattgtagagctgcctacttaactgtcttcaaaagcagcttggaaaacattatttctaaagatcaactttacttagctcttcagcatgcaggaagaaatccatcccaaaagaccattaataagtattggactcctcaaactgccaaactgaattttgatgatttttgtataattttaaggaaggaaaaacctacttcaaaagcagaactactaaaatcatttaagcaattagatgtaaatgatgatggctgtattttacacactgacctttataaatttctaacaaagagaggtgagaagatgactcgagaagaagtaaatgccataataaatttggctgatgtaaatgctgatggcaaatttgactacatcaagttttgtaaattatatatgacaaccaacgagcaatgtctcaagactacactagaaaaactagaggttgacagtaaattgatgcgtcaccagtttggaaaccacatcgaagggtcccctgaaagggacccatcaccagtaccaaaaccatcacctaaaatcacaagaaaaactgatccagaaacattcttaaataaaggtgacaccaggagttctttactgtcagcaaccaggaagttcaaaacatctgtttccttcacagttaccatgggggctaatggtaaccgaaactcaaagttaatggagccaaatttaataaaggactggcaacacatgcaatcaaaaggttgcttcttcttagaagaagatggtgaaatcattagtcatcagtacaggatgcaaatagctcagaggtccatggtttatctaacaattaagccattaaacctgagtcaagttgaaggaaaaccatccccttggttatccgttgatactgccttgtatattctcaaggaaaatgagagtcaagcaaatctacagcttgtgtgttttaccgaactacgaaatagagaagtgtttggatggactggtgaactaggacctggaatttactggttaattccttccacaactggctgtaggctgaggaaaaaaataaaaccagtaacagatgaagcccaacttgtatatagagatgaaacaggggaattattccttacaaaggaatttaagtctactttatcagatatatttgaagtaattgatttagatggaaatggtcttcttagccttgaagaatataatttttttgaattgagaacaagtggtgagaaatgtgatgaagatgcttgggctgtctgcagagagaattttgatacaaagaggaatgaactaacaagacaaggatttatggatttgaatctaatggaagctaatgatcgagaaggagatccttgtgacctttgggtaactctacactctatgggctacaataaagctctggagttgacagaggcatgtccatttgtcattgatatctatgcagaaaaatgcaagccaaaaattaaagctgtccatatggaggcatgtagtggacaacttgagaaggccatttgtaaatctgttcttagcaacggtgatgccaaagtaatggatggctatgaaaatataatcgtgcatacttacagttgtgacacctggataacgtcagttattgaaaacaagtcagatgagaaagtgattattcacatcagcaatgagctaagtaaaaactgcataaacaacagaggactcaacatatttgcagtagaagtgggacccaaatctacaatggtttgtcaacatgtaatgcctttgaatgaacgacaagaatggatatattattgtatatattctcttatttcttaaataattatacttagaacttaccaaactaagaattatttcagatttagtctgttatttattaaacaactaaatgctacttaactgatgtacctaaataataatctattcaatttatatgcattttcattttatgtccatggtatgtactttattattaaaatataaataatgctttcaaaaaaaaaaaa

SEQ ID NO: 881 - DNA, 4530 bp, Homo sapiens
  CDS (330)..(4265)
gcactgtggggcgtcatcgcgggctaccgcggccccgcccacttcacctctcaccccattagctgtccccgcgcgacagaggcggtgcgcggactacgcctcccggcgtgcatcgcgcggaccccgccccatgtgtcccattggcttctgggaaaccgagtgcggttgccttcccgccggccttcacgtcgccgtgctcggtacttgaaatcccggcaagctcggcggcgctttagctccgcctctctcctcctttgctcacgaaccccgccccagcccgccccgccccgcgccggggccggagccgcagcccgagcggcggggtgaccatggaggaagaagatgagtctcgagggaagacagaggagtcgggggaggatcggggcgatggtccgccagacagagaccccacgctttctccttctgcctttatcctgcgagccatccagcaggctgtgggaagctccctgcagggggacctgcccaatgataaagatggctctcggtgtcatggccttcgatggcggcgctgccggagtccacggtcagagccccgttcccaggaatcagggggcactgacacggctactgtgttggacatggccacggacagcttcctcgcagggctggtgagtgtcctggatcccccggatacctgggttcccagccgcctggacctgcggcctggcgaaagtgaggacatgctggagctggtggctgaggtccgaatcggggacagagatcccatccctctgcctgtgcccagcctgctgccccgtctcagggcctggaggacgggcaaaacggtttctccacagtcgaactcctctaggcccacctgtgcccgtcacctcaccttgggcacgggagacgggggccctgccccaccccctgccccctcctctgcatcctcctccccttccccttctccctcatcttcctccccttcccctcccccacccccaccgccccctgcacccccagccccacctgccccccgattcgatatctatgaccccttccaccccaccgacgaggcctactctccaccgcctgctccggagcaaaagtacgacccttttgagcccaccggctccaaccccagctcatcagcggggaccccctcacctgaggaggaagaggaggaggaagaggaagaagaagaggaagaggaagacgaggaggaggaggaaggcctgtcccagagcatcagccgcatctcggagaccctggcgggcatctacgatgacaacagcctgagccaggacttcccaggtgacgagagcccccgcccggacgcgcagcccacacagccgactcccgcccctggaacgccgccccaggtggactccacccgggctgatggagccatgcgccggcgggtcttcgtggtggggaccgaggcagaggcttgtcgggaaggcaaggtctcggtggaggtggtgaccgctggtggagccgccctcccgccgcccctgctgccgcccggcgactcggagatcgaggaaggggagatcgtccagccggaggaggagcccaggctggcgctgtccctcttccgccccggcggccgggccgcccggcctacaccggccgcctcggccacccccacggcccagccccttcctcagcctcccgctccgcgggcccccgagggggacgacttcttgtccctgcatgcggagtcggacggcgagggcgccctgcaggtggacctaggggagccggctcccgcgccgcccgccgccgactcgcgctggggcggcctggacctgcgccgcaagatcctgacccaacggcgggagcgctaccgccagcgctcgccctccccggcgcccgcgcccgccccggccgccgctgctggtccgcccacgcgcaagaagtccaggcgggaacgcaagcgcagcggcgaggccaaggaggccgcctcgtcctcgtcgggcacccagccagcgccgcccgccccggcctcgccctgggactccaagaagcaccgctcgcgggaccgcaagcccggctcccacgcctcgtcgtccgcccgccgccgctcccgctcccgctcccgctcccgctccacccgccgccgctcgcgcagcaccgaccgccgccgcgggggcagccgcaggtcgcggtcccgggagaagcggcgacggcggcggcgctccgcctccccgcccccggccacttcctcatcgtcgtcctcgaggcgcgagcggcaccgcgggaaacaccgggacggtggcggcagcaagaagaagaagaagcggtcgcggtcccggggtgagaagcggtctggggatggcagcgagaaggccccggcgcccgccccgccgccctctggctccacctcgtgtggtgaccgcgacagccgccgccggggggccgtgccaccctccatccaggacctcacggaccacgacctcttcgccatcaagcggaccatcacggtgggccggcttgacaagtccgacccccgaggaccctctcctgctccggcctcctcacctaagcgggaggtcctgtacgactccgagggactgagcggcgaggagcggggcggcaagagcagccagaaggatcggcgccgctcgggggccgcctcctcctcctcctcttcccgggagaaggggtctcgtcggaaggcgctggacgggggtgaccgggatcgggacagggacagagatagggacagggacaggtcatccaagaaggcccggccccccaaggagtcggcgccttcctcagggcccccgccaaagccaccagtcagcagcggctcaggctcttcatcctcgtcgtcctcctgttcttcccggaaggtgaagctgcagtccaaggtggcggtgctgatccgcgagggtgtcagcagcaccaccccggccaaggatgccgcgtcagccggcctgggctccattggcgtcaaattcagccgtgaccgcgagagtcgctcccccttcctcaaacctgacgagcgggcccccactgagatggccaaagcagctccgggcagcaccaagcccaaaaagaccaaggtcaaggccaaggcaggggccaagaaaaccaaggggaccaagggaaagaccaagccatccaagaccaggaaaaaggtccgcagtggaggtggcagcgggggcagtggtggccaggtgtcgctgaagaagtccaaggcggatagctgcagccaggcggcaggcaccaagggggcggaggagacttcctggtccggggaggagcgggcagccaaggttcctagcaccccgccccccaaggcagccccaccaccccctgccctcactccggactcgcagaccgtggacagcagctgcaagacacctgaggtctccttcctgcccgaggaggccactgaggaggctggggtccgaggtggggcggaggaggaggaggaggaagaagaagaggaggaggaagaggaagaggaggaggagcagcagcctgctaccaccacggccaccagcactgctgcagccgccccaagcactgcccccagcgcggggtccacagccggtgactcgggggcggaggacgggccagcttcccgtgtctcccagctgcccacgctgcccccgcccatgccctggaatctgccagctggtgtggactgcaccaccagcggcgtcctggccttgactgcacttctcttcaagatggaagaagccaacctggcgagccgagcgaaggcccaggagctgatccaggccaccaaccagatcctcagccacagaaagccaccctcaagtctggggatgaccccagctcctgtgcccacctctttgggtctgccccctggcccctccagctacctgcttcctggcagcctccctctggggggctgcggttcgaccccccccacccccaccgggctggctgccacgtctgacaagagagagggcagcagcagctctgagggccgtggggacacagataagtatctgaagaagctgcacacgcaggagcgggcggtggaggaggtgaagctggccatcaagccatactatcagaagaaggacatcaccaaggaggagtacaaggacatcctgaggaaggccgtccacaagatctgccacagcaaaagtggggaaatcaacccagtgaaggtgagcaacctggtgcgggcctacgtccagcgctaccgctacttccgcaagcacggtcgcaagccaggggaccccccagggcccccacggccgcccaaggagccagggcccccagacaagggtggcccgggcctgcccctgccccctctctgagagccctggccagctcttcgcccctcacctctttgaaactctggacgtatttatggctccacctccccacctccctcccccgtcagtgggatgactgggggagggttgctgcagggaagaggagagccccctgccctgccctgccccgtgtccacctcccttgcccccaagcctgtccccagtgcccctcccttctgtttgtgcccctctccccaatttcattaaagatttcatgaaacattacccctgaaaaaaaaaaaaa

SEQ ID NO: 882 - DNA, 822 bp, Homo sapiens
  CDS (15)..(656)
aaacaacttgtgaaatgagtgatttggaagatgatgagacaccccagctttctgcccatgccttagcagctctccaggaattttatgctgagcaaaagcaacaaattgagccaggcgaggatgataaatataacattggaataatagaagagaattggcaactgagccagttttggtatagtcaggaaactgctctgcagctggcacaggaggcaattgcagctgtaggagaaggtggcagaatcgcatgtgtgagtgcccctagtgtttaccagaaactcagagagctgtgcagagaaaacttttcgatatacatctttgaatatgacaaaagatttgccatgtatggagaggagtttattttctatgattacaataatccattggacttacccgaaagaattgctgcacatagttttgacatcgtaatagcagatcctccctatctttcggaggaatgtctcagaaaaacatcggaaaccgtcaagtacctgacgcggggcaagattctgctgtgcacaggtgccatcatggaagaacaggcagcagaactccttggagtgaagatgtgcacgtttgttccaagacacacccggaacttggcaaatgagtttcgctgttatgtgaattatgattctgggctggactgtgggatctgattacagacggtgacataacacaggaaggaaccctgtcacattcctctttttgtattttcgtagtagatttaaaagttataatctcttcccctccccccaaactggagctgtccctggcctggttttcaaaataaagtgtgcgatcttcaaaaaaaaaaaaaaa

SEQ ID NO: 883 - DNA, 838 bp, Homo sapiens
  CDS (79)..(555)
tttcgtccggaagtgcggatcccagcggcggtcgtgtagctgagcagccctggggcttggttctatgtccctgtggctatgtttccagtgtcctctgggtgtttccaagagcaacaagaaacgaataaatctctgccctgcagcgcctccaccccagagacccggaccaagttcacacaggacaatctgtgccacgcccagcgcgagcgcctggactcggccaacctgtgggtgcttgtggactgcatccttcgcgacacctccgaggacctgggactccagtgtgacgccgtgaacctggccttcgggcgccgctgtgaggaactggaggacgtgcggcacaagctgcagcaccacctgcacaagatgctgcgggaaatcacagatcaggaacacaacgtggtggcactgaaggaggccatcaaggacaaggaggaacctctgcacatagcccagacccggctgtacctgccctcacaccagcccaacatgcagctgtgccgcgaagcagcccagttcagccccagctcacaccccccaacacccccaagctggtgagtgaggtggaggagctgtacaagtccatcacagtgccgcgggagaagcttctacaagcagagcagtccctgtgcaacctcgaggacatccacatgagcctggagaaggacatcaccgccatgaccaacagtctcttcatcgaccgccagaagtgcatggcccatcgtacttgctaccccaccatcctgcagctggctggctaccagtgagcagcggcacggtgcttccccccaatcccccaaataaacagtgcgttagctttctgcaaaaaaaaaaaaaa

SEQ ID NO: 884 - DNA, 3929 bp, Homo sapiens
  CDS (1307)..(1621)
tgcacacattgtgttcttaaactgagacgtggctctgcaggtctcctgggctcattccatggtgtggtatgtttattccactgtccagagctattctctgatggatttgagcaacagcagtggagataaatgtcctagagtcaccaggtcgcttggagaagtcatttaagctgcctcgggtttttgttacttaaatgtggatattatttctccacctaaatcactgagtttacagagtaataatgtgttgctctggacattgacagctttctagagccagtaatgggctcttctgaaggatgctgaattagaagtgaacctattcataggatcaaaagccacttgctttgaaatatgtagagttcctcagaattgacggtgctagaaatatccaagtgttaaataaccttttaaaagcaacaaaagctacttttttcttaccacttaatagaagaacctgtccctagaggcgacttcattgctatggatctggagtctctgaactcttaataggatgcagcctcacatacataatgtcacccattttatgttgatgaaaacattacaagttttcttcattgggtatgtgttgatgttcacagacagtacttgggcccattaggttttcgcgtctggtcttagagcatgtgtattcatctcagcgtgaatacctcagccagtcttatgaataggaggctatgtatgggcagggaatagattagattagaacactcgcacaagatgaccacatatagaagcagaaagccccaaattccctgggaactgttttttctctagtagctgaatataaggaaatatgtctaatggacaccagttaatactttttaaaactactctttaaaaaaaaaatacgttccccttggttaactgattttttaatccagggtggacattttttcaacctttattaacaccgacaaataaactattttgtagaagatcagactcctacttaactggaagagaaatgtctattaaatgtctctcctctttctctgggtcaagaccatgtaattttatgcttcagagatgaagatactgtttgtttacaaagagtttagtttttaagacatccaaaactctatgctagagcaaaaatcaaatagcaaaggacactagccagaaaatacagtgtgtgtgtgtgcacctgtgtgcctgctgaacaacttgacagtgtaacagataaggtaactgaagatggtggatatttgaattgtattagcttaatgtctacatatctttggccaaaactctattgtcatattagaaacatgttatctttttcatgtttattagtaatttatttttgattctttgttttctttttcgtccaactaaaacaactgtaatgtacttgatacatttatatcaagttctaaagtatttagacaaatccaaatactttgtttttagttttttcctcctttccatcctgttaaccacagtgaaacgctgcagtattttgatttggtcagtgctacggaggaagaccatgaaagctgaattggtctgtgccacccagagtaaacctcttctcttcttctggaaagatggcgtgatgtttttcaaggattctaataaatatcccgcagtcatctcctgagcagctttcctctgtttcacttcggaactccttcccccactttcttcactccagtttcttcacttgcagcgttttctgctaagaaagacttatcatcttgtatctgtttatgcctctcttctttggggcccctggatgtttttgtggatttttacagagtatttatatctgcacagcgtgtattttgttatacattcttacaagcattgatattggggggtacattcataatagtgagaatatctggcagaatgtgtgaatgccatatctgtagatgacgatgaatgtgaagggttaatgtagaaatgtttgtttattctgttacagctcaaaatggaggctgagaatctctaccaccattcccttctctatttgagaatctctaccaccattcccttctctatttgggaaacaatactctcttattttgctatttttaccttcccattaactggcttcactcaacagtgccagatacctatggagaggggaagtaaaacaccttaggtcaggaataataaaccaatgagttagctcagggccggtggacatgttcactggtggaccagttggcattgacctaaacggacagagaaatgcacatggaggagaactacgttgaaatcaagatcctatgtctgttgtattttctctttgcctggagtaaatagcattataagtcattccacccttattagataaccaaagcatattggtctcaatagctttctcctgaaaaatgtgattgaatcttacctgtagcagttcactcttaaggttgaaagaactgtcaatatagataaaatccattccttattattattgattggtgtgacatttgaaaatgtgtctaaacaatatttgtaagtaaaagaaccagtcataagcctcaaatgtgttcagtgtgtaccaagctggaatgggagactggcccctcttggctttaaagtagcatgttgtctttttctagcagcttcttcctagtagacattccagggatgggaggggccagggatcatgtcttactcatttctgtatcgccagcccctggcatagtgtctggcttatgttacgtgaataaatgaatgcttgccaagatctcttcttccctcaagtttctggaaaacctgagggttcgtgatacctgttcccactcctcatcagcgggctggcaagaaagcaaataaggggaaacatttttaacattccaagcaagagaaggaagaacgactattgggaggaggtacaccagagattgctcagtgggcagcctgctacctcacttttggctctggattgcctgggggtaaaagggaaaagtattatgtagttagcaccttacatatttgatgctcaggaagaaagggcaagaagatccctaatagaacattaaagattcttaaaagtttttgaagtaggctgcttggggtgaccagccccacccttacatctccatagttggtacagttagcttgtagcagctgaagctgatgcctggagatcactgtctgttggtctgatctcagtatcatactgagacacctcccctgagccttacctacttaaattggtaaccgtcctaccaaaatttgtcaattttaatcaagtgaggcaagttgcaagggagccagagatacgtgaaaaaagaaaagcagaaatactgatactttctaagaaagaagttgtaataatttctttggcacattgacttactgatatcttttgaaatgcatagatgactcttgtgaaccaaagagagcagtagtggttattccccggcgcaataaaaatgcctttgtgtatcacttgcgattgccagtcatttctgtgccagttgctttcattccagagaatggcctcattctccaaaaaaagatgatgattttagaagtaggatttcctaacaaattatgtggtggggagggacggcggggattttattcatcccgtctgagctcttcatacagtattaccattaggttttaagaacaaagatgggggaggagggagtagaaagctgagagtacgtagaacagctacaagacattagtgggtattcagattttgagctgtgtaaatatcaaacatcggcttccagccttaagagttatttgagcagagagttaaggaggaatgggagattttgtgaataaaatgttttgccaaactgaatgagtctttttgccattattatagagagctattttttaccttctgaaacaactcatcagacatctggggtttatcttgaattgtaccatcattgtttcttaataaaagtgataaatttcaaaaaaaaaaaaaa

SEQ ID NO: 885 - DNA, 1820 bp, Homo sapiens
  CDS (424)..(1518)
gtgctgtacagtgtgagggaacgtgtaccaaacgctctgcgggatacctgtgcccgtctagccaagagtgcacccgtgtgcgcgagcgggcttctgggacgccgccgtggtcgggggcggccctgcgaggggagggggtcacagggactggccggcgccggccccgtgcgcacggaggcgggggcggggggcgggggccgcgaggggggaggcggtacgaaaagggcggcgcgcgcggcggcggcggcagctccccggcagcggcggtggtagagcgcagcgcgcagcccggtgcagccctggctttcccctcgctgcgcgcccgcgccccctttcgcgtccgcaaccagaagcccagtgcggcgccaggagccggacccgcgcccgcaccgctcccgggaccgcgaccccggccgcccagagatgaccgcgaccgaagccctcctgcgcgtcctcttgctcctgctggctttcggccacagcacctatggggctgaatgcttcccggcctgcaacccccaaaatggattctgcgaggatgacaatgtttgcaggtgccagcctggctggcagggtcccctttgtgaccagtgcgtgacctctcccggctgccttcacggactctgtggagaacccgggcagtgcatttgcaccgacggctgggacggggagctctgtgatagagatgttcgggcctgctcctcggccccctgtgccaacaacgggacctgcgtgagcctggacgatggcctctatgaatgctcctgtgcccccgggtactcgggaaaggactgccagagcgtggatgatgagggccgggcctcccatgcctcctgcctgtgcccccctggcttctcaggcaatttctgcgagatcgtggccaacagctgcacccccaacccatgcgagaacgacggcgtctgcactgacatcgggggcgacttccgctgccggtgcccagccggcttcatcgacaagacctgcagccgcccggtgaccaactgcgccagcagcccgtgccagaacgggggcacctgcctgcagcacacccaggtgagctacgagtgtctgtgcaagcccgagttcacaggtctcacctgtgtcaagaagcgcgcgctgagcccccagcaggtcacccgtctgcccagcggctatgggctggcctaccgcctgacccctggggtgcacgagctgccggtgcagcagccggagcaccgcatcctgaaggtgtccatgaaagagctcaacaagaaaacccctctcctcaccgagggccaggccatctgcttcaccatcctgggcgtgctcaccagcctggtggtgctgggcactgtgggtatcgtcttcctcaacaagtgcgagacctgggtgtccaacctgcgctacaaccacatgctgcggaagaagaagaacctgctgcttcagtacaacagcggggaggacctggccgtcaacatcatcttccccgagaagatcgacatgaccaccttcagcaaggaggccggcgacgaggagatctaagcagcgttcccacagccccctctagattcttggagttccgcagagcttactatacgcggtctgtcctaatctttgtggtgttcgctatctcttgtgtcaaatctggtgaacgctacgcttacatatattgtctttgtgctgctgtgtgacaaacgcaatgcaaaaacaatcctctttctctctcttaatgcatgatacagaataataataagaatttcatctttaaatgagtaagagaaataagtatgttattctaaaatctaaactcaaatgaaatttcaaaaaagaccaaaaaaaaa

SEQ ID NO: 886 - DNA, 1423 bp, Homo sapiens
  CDS (191)..(1180)
cagatctgtcttagaggggccaggtgcagagaaaggcagaaatcctaataatgttcccagcgatcgctgcctgtcgcggagtgctgaagggccaagtgttgatctgagtcctcatcacacgggacttcatttagtctcacgataggcatgccggctgccgctccaggactcccctgtccccaggaccaagatgacgcccaacagcactggcgaggtgcccagccccattcccaagggggctttggggctctccctggccctggcaagcctcatcatcaccgcgaacctgctcctagccctgggcatcgcctgggaccgccgcctgcgcagcccacctgctggctgcttcttcctgagcctactgctggctgggctgctcacgggtctggcattgcccacattgccagggctgtggaaccagagtcgccggggttactggtcctgcctcctcgtctacttggctcccaacttctccttcctctccctgcttgccaacctcttgctggtgcacggggagcgctacatggcagtcctgaggccactccagccccctgggagcattcggctggccctgctcctcacctgggctggtcccctgctctttgccagtctgcccgctctggggtggaaccactggacccctggtgccaactgcagctcccaggctatcttcccagccccctacctgtacctcgaagtctatgggctcctgctgcccgccgtgggtgctgctgccttcctctctgtccgcgtgctggccactgcccaccgccagctgcaggacatctgccggctggagcgggcagtgtgccgcgatgagccctccgccctggcccgggcccttacctggaggcaggcaagggcacaggctggagccatgctgctcttcgggctgtgctgggggccctacgtggccacactgctcctctcagtcctggcctatgagcagcgcccgccactggggcctgggacactgttgtccctcctctccctaggaagtgccagtgcagcggcagtgcccgtagccatggggctgggcgatcagcgctacacagccccctggagggcagccgcccaaaggtgcctgcaggggctgtggggaagagcctcccgggacagtcccggccccagcattgcctaccacccaagcagccaaagcagtgtcgacctggacttgaactaaaggaagggcctctgctgactcctaccagagcatccgtccagctcagccatccagcctgtctctactgggccccacttctctggatcagagaccctgcctctgtttgaccccgcactgactgaataaagctcctctggccgcttatgattatctcattccatatctcagggcgaggcaggaggaaatggctcaacacaccaacaatagaaagaacctacagacatacgcgtggattaaggg

SEQ ID NO: 887 - DNA, 2772 bp, Homo sapiens
  CDS (304)..(2178)
gggccgcacgcgctggcggactaagagtggctggcgaagcgagcggccggcgcgggcccctggcgggcgggcggtacagccccaagcctgagacccggacctgagcatcgcaggttcgagtcccgccccgcctggggcgaagccgggggtggcggcgacctcgcggcgttgcaccggctctgtgagcacctcccctctgagcacttcccttgtgacaggccacttcccttgtgacaggcccaggacgaggtggccaggcggcccccatggcgtccctggtctaggcggagaaccgcctgggcgatgagtgagaacctcgacaacgagggcccgaagcccatggagagctgtggccaggagagcagcagtgccctgagctgccctaccgtctcggtgccccctgcagccccggcagccctggaggaggtggagaaagagggcgctggggcggctacagggccggggcctcagcccgggctctacagctacatcagggatgacttgtttacctctgagatctttaaactggagctgcagaacgtgcctcgccacgccagcttcagcgacgtccggcgcttcctgggccgctttggtctgcagccccacaaaaccaaactctttgggcaaccaccctgcgcctttgtgacattccgcagcgctgcagagagggacaaggccctgcgcgttttgcatggtgccctctggaaaggccgcccactcagtgtgcgcctggcccggcccaaggccgaccccatggccaggaggaggcgacaggagggtgagagtgagccaccagtaacacgagtggccgacgtggtgacccctctatggacagtgccctatgctgagcagcttgagcggaagcagctggagtgcgagcaggtgctgcagaaacttgccaaggaaatcgggagcaccaaccgtgccttgctgccctggctgctcgagcagaggcacaagcacaacaaggcctgctgcccgctggagggggtcaggccatcaccccagcagactgagtatcgtaataagtgtgagtttctggttggcgtcggggtggatggggaggataacaccgtgggctgtcggctcggcaagtacaagggcgggacgtgtgctgtggcagccccgtttgacaccgtgcacatccccgaagccaccaagcaggtggtgaaggccttccaggagttcatccggtccactccatactcggcatacgacccagagacgtacacaggccactggaagcagctgactgtgcgcaccagccgccgccaccaggccatggccattgcctacttccacccccagaagctgagccctgaggagctggcagagctgaagacctccctagcgcagcacttcacagcagggccaggcagggccagtggagtgacctgcctctacttcgtggaggagggacagcgaaagactcctagccaggagggcctgcccctggagcatgtggctggggaccggtgcatccacgaggacctgctagggctgaccttccggatctctccacacgccttcttccaggtgaacacacccgcagccgaggtgctctacacagtcatccaggactgggcccaattggatgcggggagcatggtgctggacgtgtgctgtggcaccggcaccattggcctggccctggcccggaaggtaaagagggtcattggggtcgagctatgcccagaggctgtggaggacgcccgggtgaacgcccaggacaatgagttgagtaatgtggagttccactgcgggagggccgaggacctggtgcccaccctggtgagcagactggcctcccagcacctcgtggccatcctggacccaccccgtgctggcttgcattccaaggtgatcctggccatccggagagctaagaacctcaggcggctgctgtacgtctcatgcaacccccgggcagccatgggcaactttgtggacctctgcagagccccatctaaccgggtgaagggcattcccttccggccggtcaaggctgtggcagtggacctgttcccgcagaccccgcactgtgagatgctcatcctgtttgagagggtggagcaccccaatggcacaggggtcttggggccccacagccctccagctcaacccacaccaggacccccagataacaccctacaagaaactgggaccttcccctcatcctaggcccaggacccattatggggacaggagctgaagggctcccagggccccaggggcggggaaggcatggcttgctggccaggatattcagaggtaggcagccaaagggcacagaaccctgtgccccaccaggattggcctgctgctaggggccaggggccctgaccaggaagacaggtgggttcctgtagcctgttgcccatccccagggcctttgtggactagccaaggctgtgagggccagaataaacaactgctcaacaaagggtgtttctgtgatgagagccagggtctgaacacagggcctgggtgccaggaaagggccaaactaggcctaggcagctctgcaagcctctctgcatggctgggggagtcagggcagagcttactttaaaaaagaatgttcgatttgatacttaaacttgaggagaggcagagagaggtctgggaactgcaccagctgggggcatgggggtggagaacactgggcagagttggcccctctgtggccagctggccctcagcccagcagagaggggcatcaaccaaggaaggggccatgctggggtgctgctcagctgttacaaaggcagg

SEQ ID NO: 888 - DNA, 2911 bp, Homo sapiens
  CDS (1)..(1515)
atgtcggccgaggagatggtgcagatccgcctggaggaccgctgctacccggtgagcaagaggaagctcatcgagcagagcgactacttccgcgccctctaccgctccggcatgcgcgaggccctgagccaggaggccggcggcccggaggtgcagcagctgcgcggcctcagcgcgccgggcctgcggctggtgctggacttcatcaacgccggcggggcccgcgaaggctggctcctgggcccgcgcggggaaaagggcggcggggtggacgaggacgaggagatggatgaggtgagcctgctgtccgagctggtggaggcggcctccttcctgcaggtcacgtccctgctgcagctgctgctgtcccaggtgcggctcaataactgcctggagatgtaccgcctggcgcaggtgtacgggctgcccgacctgcaggaggcctgcctgcgcttcatggtcgtccacttccacgaggtgctgtgcaagccccagttccacctcctggggtctcctccccaagctccaggggatgtcagcctgaagcagaggctgagggaggcccggatgactgggactcctgtcctcgtggccctcggggacttcctggggggacccctggcccctcacccctaccagggggagcccccgtccatgctcaggtacgaggagatgactgagcgttggttcccgctggccaacaaccttcctcccgacctggtcaatgtcaggggctatgggtctgccatcctggacaactacctcttcatagtgggcgggtacaggatcactagccaggagatctccgctgcgcattcctacaaccccagcaccaacgagtggctccaggtggcctccatgaaccagaagaggtctaacttcaaacttgtggctgttaattcaaaactctatgccatcggagggcaggccgtttctaacgttgagtgttacaaccccgagcaggatgcgtggaattttgtggcgcccttacccaatcctctggctgagttctctgcctgtgagtgtaagggaaaaatttatgccatcggaggatacactaccagagaccggaacatgaacattttgcagtactgcccctcttccgacatgtggacgctctttgaaacatgtgacgtccacattcgcaagcagcagatggtgtctgtggaagagaccatctacatcgtgggggggtgtctccacgagctggggcccaaccgcaggagcagccagagcgaggacatgctcaccgtgcagtcctacaacaccgtcacccgccagtggctctacctcaaggagaacacgtccaaatcgggtcttaacttgacttgtgcgctccataacgacggcatctacatcatgagcagagacgtcaccctgtcgaccagcttggaacaccgagtgttcctcaagtacaacatcttttcagatagttgggaagcatttcggcgttttccagcttttggacataacttgctggtttcttctctttatctgcccaataaagcagaaacatgactgaattgaattggtagatgaaaaaaacctggttcaagttttttttaaaatgtggtgtcccattccaagggagaccaattcctaaagggtaaagaagggttaaagtaggtcacatatatacagtagcagctgtaaataagcttacttgaactaattacttgaaaactggtggaaaaaagagaccaactttgttattttttaaattattgatttttaaattatgggagcaaatccatctccaaacatgatactcttgggccaatgacggatcatcaaaatgtagattcattgtgtctgtgtggtaaagggccaaagtcaataattgggacaaatggtaaagatgattttaaaatctgttgtatttaggtcccttgacatatcattagcaccttaagtgagaggttttctttttcttatcagtgtccttgacaagcattcatattaacatattcattctctcttctccatcacccatacccacacatacatctagtatgtttagggttctgtgttcagatattttgtttgcacactactttttaggaaacttataatgatggagccctacagtgaatccttaccagtgttcagtcctccccaaaacttgcataaaaatattcttagctatttttccagccttttttgcagttacaaatgctggataaatagactgataaaacctcttattttatttatgtggcaggttgcatatttatgtggacacataggttgcactgctaggcattctgtattgttttaaagaggatatattatttagaaaaatggacatatgaatattattaaaaattgagtcttaaatttaaatgggaagggaagaaaacaccaaataagaaaaaaatttgcctttaagagttacttttgttgaatgtatttgacttagttcttattttaaggctaaaaaaactttgtcatatttaagtcggcagctttctaatttaatcttagctttgtaattcatgttttgcttttgtggactaaggtaaggacagcatttaaatatttgtgctggagtgaggggaagaagctgttacagaagtggaatggtttctggtggtatttctgaagttaggtaaagtgctttacttgccttggttgttaattgaaatagaattcagctcaagcagttgttttcagtgagtgagttaacaataaaagcttctgccaatcatagatcaacattcctcaaaaatacatacactcatacttatggaaattttattttgattgaaaacactctgaaattatctgatattttgtaatggcatcagttaaactgtgagctggattccatctttctgcagtaacagcgggcagaaccatttcagttagcatgtgcctcactttaagaaagtcctgtaggggaaaaaaaaaa

SEQ ID NO: 889 - DNA, 3195 bp, Homo sapiens
  CDS (1)..(1755)
  misc_feature (1)...(3195): n = a,t,c or g
atgttcacctacaagcgtccaaatgagatttcgagcactgccggagagtcctttttggcggaaggtcccaccaacgagatcttggatgtctacatgatacaccagcagccaaacccaggcgtgcactacgagtacgtgatcatggggaccaacgccatcagcccccaggtgccaccccacaggagaccaggggaacccttcaatggccagatggtgacagaaggcaggagccaggaggagggagaacagaaagggaggaacgaggagaaggaagacttgcgtggggaggcccctgagatgttcacctcagaatcggcacagaccttcccagtcaggcatccagacagattttctccccatcgaccggacaacttggtgccaccagcaccgcagcccccacggcgcagccgggatcacaactggaagcagcttgggacaacagaatgttccacgacctgtgggaaaggatcgcagtaccctattttccgctgtgtgcacagaagcactcatgaagaggctcctgagagttactgtgactccagcatgaagccgacccccgaggaggagccctgcaacatcttcccttgcccagccttttgggacatcggggagtggtctgagtgcagcaagacctgtggcctgggcatgcagcaccgccaggttctgtgccgccaggtgtacgccaaccgcagcctgacggtgcagccctaccgctgccagcacctggagaaacctgagaccaccagcacctgccaactcaagatctgcagcgagtggcagatccggaccgactggacctcgtgctcggtgccctgcggcgtgggacagaggacccgtgatgtgaagtgtgtgagcaacattggggatgtggttgacgatgaggaatgcaacatgaagctccggccgaatgacattgagaactgcgacatgggaccctgtgccaagagctggttcctcaccgagtggagcgaaaggtgctcagcggagtgtggggccggagtgcggacacgctcggtggtgtgcatgaccaaccatgtcagcagcctgcccctggagggctgtgggaacaaccggccggcagaggccaccccatgtgacaacggaccctgcacgggcaaggtggagtggtttgccgggagctggagtcagtgttccatcgagtgtgggagcgggacgcaacagagggaggtgatgtgtgttagaaagaatgcagacacctttgcagtgttgagcccctctgaatgttctttcctggagagaccgcccagtcagcattcctgccacctcaagccttgcggagccaaatggtatagcaccgaatggagcatgcgttccaagagctgccacagtggctgtcggctccggaaagcgcggcgtctgtctgatgacatgactctaagtaacctgtgtgaccctcagctgaaaccagaagagagagaatcttgtaccctcaggactgtgttcctgaagcagatgaaaactgcatggacaagtactacaactgcaacgtggtggtccaggcaagactctgtgtctacaactactacaagaccgcctgctgtgcctcctgcacccgtgtggccaacaggcagacgggcttcctggggagcagataacactcctgcacccccatcagtagggcagcatcactgccttcccgggggcttcagcagtgcgcctggctggctgctgctccaccacgggccccctggcccaggcgctgccaaccaacttagccaccacccctgcctccggtgaatgcaccccgtggtacccaggggctttttacacaagatgtttgaaagccacagtcagtcctttaagcatcaccatgtactgatgatcccctccttggacctggcatctgctaatggtgccctttgaaagtcaagcagtgggaagtacatggagctctccgccctgctcccatctggcaccttcaagtcagcagatgggccactgactgagcactgccccgtccctggtgctactggtctttctaaacttagcaccctggagagtccaaggaggcagcgcccccaacccagcgccccactaagccttgctgacacgcgtgcatccctctgtgacctcagcccagatgtgcctgttttcattctcaaagacattagactgttttcctgccctatgacacagatagctcacatgaatattgtgctttatttagcaggtgtactcacagatactagctccttagcagctcacaacatcccagaatgggaggcagggggtgactcattatcccatttttactgacagggaaactgaggctcaacttaagtaattgacctgccaggtatattcacccatccagtggaagagctgagtccccgccccagtcatctaccagtatccagcctggggcctgtacttagatgtgaaaggtgctgcttcatttctgaccaagagactgagaagtttcccagaatgcaaacaaagcccaggcccctgaaatctttccggtcaagcctttatcccagcactcagttgttttggatgtctgttcctacttgcccttacccccaaagttacagatcctagttacaggactctgccagctttgttaaactgtccgtgagacaagaaagccattggggaaaccaggtgattgcctgaaattcttactccgttccaagtgctgttcctcccaggaaatcaaaggccagggtccttatggccgtggagccttcccgaccacagagccaacttgtgaagcacacagctctgcagcctgggctctgccctgcctcagccgcctcccccacgctcttcaccacgttcctggagagtccggccaacctgtcccagccaaaacactgctgtattagaaaaagtctctttctggtctttctggttttgtttatgaatttccctctgtggccacaaattcctcccctcccccatgactcacagtccatatggcccacccccagacttgagcaccaagctctgcattaatgcagttggcctgcgacaaggagctgtggacccttccccatctcttccaattcactttccccaactatccagttccnnangagcgcaggcctggaaggatgcagtgcatattgaaaggtggaccctctgaaaacagttaagaggaatatatgtatgttttacccattaagaaaaaatggcaagctaaacaaatgttaaacttacagaaaaaaaaaa

SEQ ID NO: 890 - DNA, 1700 bp, Homo sapiens
  CDS (317)..(1447)
cttaaggcaggtctggtttggacgactttgttttgtctcccagtattgaaggcttttactctggacttgaatcctcgcctttggtttttgttcagaggaaagcgttcctctcccctgcgcaggatcgctctgtttctcagtaaacatgacgagggggtttagcactttttaagtacatataagctggtgactctagaagggtacagatttggagaatgcctgcgccggtcctattcttttttcctggggtttctggattttagtcttttaagtggatcctcccgtcggattactagaacgggcggaggcgcaggccatgctgcggctggtgcccaccggggcccgggccatcgaggacatgtcgtacgcccgccacttcctggacttacagggctccgccattccccaagccatgcagaagctgggggtgacccggctgagccccaacttccgcgaggccgtcaccctgagccgggactgcccggtgccgctccccggggacggagacctcctcgtccggaaccgatttgttggtgttaatgcatctgacatcaactattcagcaggccgctatgacccctcagttaagcctccctttgacataggtttcgaaggcattggggaggtggtggccctaggcctctctgctagtgccagatacacagttggccaagctgtggcttacatggcacctggttcttttgctgagtacacagttgtgcctgccagcattgcaactccagtgccctcagtgaaacccgagtatcttaccctgctggtaagtggcaccaccgcatacatcagcctgaaagagctcggaggactgtcggaagggaaaaaagttttggtgacagcagcagctgggggaacgggccagtttgccatgcagctttcaaagaaggcaaagtgccatgtaattggaacctgctcttctgatgaaaagtctgcttttctgaaatctcttggctgtgatcgtcctatcaactataaaactgaacccgtaggtaccgtccttaagcaggagtaccctgaaggtgtcgatgtggtctatgaatctgttgggggagccatgtttgacttggctgtagacgccctggctacgaaagggcgcttgatagtaatagggtttatctctggctaccaaactcctactggcctttcgcctgtgaaagcaggaacattgccagccaaactgctcaagaaatctgccagcgtacagggcttcttcctgaaccattacctttctaagtatcaagcagccatgagccacttgctcgagatgtgtgtgagcggagacctggtttgtgaggtggaccttggagatctgtctccagagggcaggtttactggcctggagtccatattccgtgctgtcaattatatgtacatgggaaaaaacactggaaaaattgtagttgaattacctcactctgtcaacagtaagctgtaaaaacagaacaatgacataaatcaagggagaaagaaaatgggcactttatgtctcagaattactcaaatcaatttatttttagttggtaatggatataatatttcttaaaacaaaagtaaggtgttaatgaataggtctctccttctcctcctcctcctcctcttcccttgggggaaaaaaaaaaatgtgctaataaaacttccctccatggctaagagggaaaacgcttacattcaaaaaaaaaaaaaaa

SEQ ID NO: 891 - DNA, 1721 bp, Homo sapiens
  CDS (259)..(1308)
tttcgttgctggcccggggtggcaggagccgcagaggcttgggctgcagaaaaaggatcctgtttgctgtgtaatcctgagaatggactgcaagagaggaaaaactgggcgtctgcttgggaatctattgtggaaacccagggtgtttcccgaccagtccctgggcgccaactagagtatggactgaccaggtacctggatggagacctgagctggagaaggagatgcgcttgggaggaaattgcagaggccgtcaacatggaaaagcagccccagaacagcaggagaggcctcgccccccgagaggtgccgccagctgttgggctgctgctgatcatggccctgatgaatactctgctctacctctgcctcgaccacttcttcatcgctcctcgacaatccactgtggaccccacacactgtccctatggtcacttcaggataggacagatgaaaaactgcccaccttggctgtcctgcgaggagctgagaacagaagtgagacagctgaagcgtgttggggaaggagctgtaaagagagtctttctgtctgagtggaaggagcacaaagttgcactctcacagctcaccagcctggagatgaaagatgatttcctccatggactgcagatgctgaaatctctccaaggcacacatgttgtcacgctgcttggctattgtgaggatgacaacactatgcttactgaatatcaccctctaggttccttgagtaacctggaagaaacactaaacctttcaaagtaccaaaatgtgaacacgtggcagcacaggctggagctggccatggactatgtcagcatcattaattacctgcaccacagccctgtgggcacacgggtcatgtgcgactccaacgacctgccgaagacactgtcccagtatctgctaacaagcaacttcagcattttggcaaatgacttggacgccttacccctggtgaaccacagctccgggatgctggtgaagtgcggccacagggagctgcatggggatttcgtggctccagagcaactgtggccctatggagaggacgtgcctttccacgatgatctcatgccctcatatgatgagaagattgacatttggaagatcccagacatctccagtttccttctggggcacattgaagggagtgatatggtccgattccatttgtttgatattcacaaagcatgcaagagccagactccctcagaaagacccactgcccaggacgttctggagacctaccagaaggtcttggatacacttagagatgccatgatgtctcaggcaagagagatgctgtgaaaaccagtccagccaatgaaggtcatatatctaataaggaattgatatccagtgtacatgtaaaactcctgtaattcaatacagaaaccaaacagtccaattaataaatggagaagagatttgaatgaacatttttgtaaagaacatctcaagctcaagatttcccagataacttttctttcttcaaaatctgcttctgtgtttcctcatctgtaggtggcacagcatacatctgatttcccaagccagaagcctcatagttattcttgactccaggaagaaatagtattgagtttgtaaaaactcggccagtggactcattgttgtatataatataatgcagcagttttaagtgtatatcgcaatgagttgtaagactcttatgtactggcgtcactatcctcatagat

SEQ ID NO: 892 - DNA, 1049 bp, Homo sapiens
  CDS (165)..(782)
ctgtttccgtggaggaaggcagacttcagactgaaggacagagaaggcaactgccctacagccctgcaggtcttcaagtctgtggttgtgggcactaacccagacaagaaaaggaaagacctgcagtatcggtgcaggaaaggcaaagaagggaacatctcaacatggaaaagctctacaaagaaaatgaaggaaagccagagaatgaaagaaacctagaaagtgagggaaagccagaggatgagggaagtacagaagatgaaggaaagtcagacgaggaagaaaagccggacatggaggggaagacagaatgcgagggaaagcgagaggatgagggagagccaggtgatgagggacaactggaagatgagggaaaccaggaaaagcagggcaagtctgaaggtgaggacaagccacaaagtgagggcaagccagcctcccaggccaagccagagagccagccgcgggccgccgaaaagcgcccggctgaagattatgtgccccggaaagcaaaaagaaaaaccgacagggggacggacgattcccccaaggactctcaggaggacttacaagaaaggcatctgagcagtgaggagatgatgagagaatgtggagatgtgtcaagggctcaggaggagctaaggaaaaaacagaaaatgggtggttttcattggatgcaaagagatgtacaggatccattcgccccaaggggccaacggggtgtgaggggagtgaggggcggaggtaggggccagaaagacttagaagatgtcccatatgtttaatgtctttggcctttaattctgatttctctgatgggaatattgccagtcctgcttttcctggcaggcatttgccggcctatgtgctttaaccttaagctgatactttcctttaggtgtcactcttgttaccagcagacttttgacccaactacagtgctctgtcttttagtagaggattttcacccatgtgcatggaataaatgttcatggtacattgtaaaataacaataaaaaagagttttcagaaccatgaaaaaaaaaaaa

SEQ ID NO: 893 - DNA, 2078 bp, Homo sapiens
  CDS (415)..(1920)
tttcgtcgggagaccctgtgcccctaaatcgcggtccactgcgcgcgtcaggtttctagaagcagggtagaacagagggcagacacctagcccaggctggtgttgttactaaacaatggcagctggtgagccaagggtgaccagggccctgaactctgtggcccagctttgagggaagcaaaattgttctcaattgtggaagaggagaatttggacagcagaacaaaaaaggaagacagcctcttggagcagatacatttgtcacaggaagccacatcaaaccctggggcctttgctgggcctctccatctgcccagttactgggaggtagatagccccaggaaggaatccagtcaggcctgggcaccaggccaggagtggataaagctagaaagagacaccacagaagagaagatgtttgaacagctgaagccaatcgaacctgtacagaagacgctcccatgggtgggcgaggtagctgccaccctgcaggaagccatgaagagagattgctggagggaggcacgggtgaagaagaagccagtcacctttgaggatgtggcagtgaatttcacccaggaagagtgggactgtctagatgccagccagagggtcctttaccaggatgttatgtcggaaacctttaagaatctaacatctgtagaaggcaagaagaaagagcttcgagaacaacatcccagtctgagagatgaggggactagtgatgacaaggtcttccttgcatgcagaggggccggccagtgccccctatctgccccagctgggactatggacaggacccgggtgcttcaagcatcccaggctgggccaccctttttttgctacacctgtggcaaatgtttcagcaggcgctcctacctctatagccaccagtttgttcacaatcccaagctgactaacagctgcagtcagtgtgggaagttgtttcggagccccaagtccctcagctatcacagacgcatgcatcttggggagaggcccttctgttgcacgctctgtgacaagacctactgtgatgcttctggactaagtcgtcaccgccgcgtccatctgggttaccggccccattcatgctctgtgtgtgggaagagcttccgggaccagtttgagctcaaacgccaccagaagatacaccaaaaccaggagccagtggatggaaaccaggagtgtactttgaggattccaggcacccaggctgaattccagacacccatcgccagaagccagaggtccatccaggggcttttggatgtgaaccatgcaccagtggccaggtcccaggaacccatatttagaactgagggtcctatggcccagaaccaggcatctgtacttaagaaccaagcacctgtgaccaggacccaggcacccatcactggaaccctctgtcaggttgccagatccaactctcatccagtgaagccctcaagactcaatgtcttctgttgcccccattgttctttgacttttagcaagaaatcctatctctccagacaccagaaggcccacctcacagagccgcccaactactgcttccattgcagcaagtctttcagctcattttccaggctggtcagacaccagcagacccactggaagcagaagagctacctttgccctatctgtgacctctcctttggggagaaagagggccttatggatcactggaggggctataaaggcaaggacctgtgccagagcagccaccataaatgccgggtgatcctgggccagtggcttggcttctctcatgatgtccccactatggctggggaggaatggaagcatggaggtgatcaatctccccccaggatccatacccccaggagaagaggcctaagagagaaggcctgcaaaggagacaaaacaaaggaggcagtgagcatcttgaaacataaataaatggcctttctgactgagctctttctttgtgtttagttttcctgaggactgacctctggggtaatgaggctggagtagagggagacaggtgcgtggataaggaaggaaatacataaaagccaaggggttagaagtgtgcttatgaaaacttgtat

SEQ ID NO: 894 - DNA, 2089 bp, Homo sapiens
  CDS (70)..(1944)
tttcgtaggagtgacagtctagacgatcatatcatcaaatcaaacactggcccaaatggacacccagacatgtgttttgtggaactccctggagtggaatttcgggcagcttctgtaaacagccgcaaagacaagtctttaagggtaatgagccagaaatttgtgatgctgtttttggtgtcaacgcctcagatagtaagcctagaagttgctgccaagattttaattggggaggaccatgtggaagatttggataaaagcaagtttaaaacaaaaattaggaggttgtatgatatagctaatgttctgagtagcctggatcttatcaagaaagttcatgttacagaggaaagaggccgaaaaccagctttcaaatggaccggcccagaaatcagtccaaataccagtggctccagcccagtcattcattttactccctctgatttggaggtgagacggtcttcaaaagagaactgtgccaaaaacctcttttccacacgtgggaaaccaaactttactcgacacccatctcttatcaaattggtaaagagtatagaaagtgatcggagaaagataaattctgcgcccagtagccctatcaagaccaacaaagctgagagttctcagaattctgcacccttcccaagtaaaatggctcagctcgcagctatttgtaaaatgcagttagaagagcaatcaagtgaatccagacagaaagtgaaagtacagctggcaagatctggaccctgcaaaccagtagcccctctggaccccccagtgaatgctgagatggagctgacagcaccgtccctcatccagcccctgggaatggttcccctgatccccagccccttgtcatcagcagtgcccctgatcctacctcaggccccttcaggcccatcctatgccatctacctgcagcccactcaagcccaccaaagtgtgacgccaccccaaggcctgagcccaacggtgtgcaccacccactcttctaaagctactggctcaaaagactccacagatgccaccactgagaaggcagccaatgatacctcaaaggccagtgcctctaccaggcctggaagcttgctgccagcaccagagaggcaaggggcaaagagccgaaccagggagccagctggagaaagaggctcaaagagggcaagcatgctcgaggacagtggttccaaaaagaaatttaaagaggacctaaaaggacttgaaaatgtctccgcaaccttgttcccatcaggatacctaatccctctcacgcagtgctcatccctgggggcagagtccattttgtctggtaaagaaaactcaagtgctctttccccaaaccacaggatttacagctccccaattgcaggtgttattccagtgacatcatctgaactcactgctgttaattttccctcttttcatgtaacaccgttgaagctaatggtctcaccaacttccgtggcagccgtacctgtcgggaacagcccggctctcgcttcaagccaccctgttcccatccagaacccaagctcagccattgtaaacttcaccctgcagcacctgggactcatctcacccaatgtgcagttgtctgccagccctgggtctggaatcgttcctgtgtctccaagaatagagtctgttaatgtcgcaccagaaaatgcaggcactcagcaaggaagggccaccaactatgactcaccagtcccaggccagagccagccaaatggacaatcagttgctgtgacaggggcacaacagcctgttcctgtgacacccaaagggtcacaattagtggccgaaagtttcttccgtaccccaggtggacccaccaagccaaccagctcatcctgcatggattttgagggtgctagtaaaacctccttaggaactctctttgtcccacagcgaaaactggaagtctcaacagaggatgtccattaatcaacagatgttggcttagtttaattttctaaagagttgtttaatagagaaaatgtacacagactgatttggagaacacattctctgaaaatactgtaaatacgttggggatttgttcaatgtgaaatcagatagttgtttt

SEQ ID NO: 895 - DNA, 3062 bp, Homo sapiens
  CDS (196)..(2715)
gagccgtgaggggcgctgcggggaagccacctgcggattcactggctgctgctccgcccaggactgctagcaagcacggagggctgccagacctggggctccctgctccgtgcgtcaggttggggaaaccaccgtctgccccagaccctgacccaggacccgcctggaggaagctgggaccgaggctgggccaagatggcgtctgtgtttcgaagcgaggagatgtgtttgtcacaactgtttctccaggtggaagctgcatattgctgtgtggctgagctcggagagctcggattggttcagttcaaagatttaaatatgaatgtgaacagctttcaaaggaaatttgtgaatgaagtcagaaggtgtgaatcactggagagaatcctccgttttctggaagacgagatgcaaaatgagattgtagttcagttgctcgagaaaagcccactgaccccgctcccacgggaaatgattaccctggagactgttctagaaaaactggaaggagagttacaggaagccaaccagaaccagcaggccttgaaacaaagcttcctagaactgacagaactgaaatacctcctgaagaaaacccaagacttctttgagacggaaaccaatttagctgatgatttctttactgaggacacttctggcctcctggagttgaaagcagtgcctgcatatatgaccggaaagttggggttcatagccggtgtgatcaacagggagaggatggcttcctttgagcggttactgtggcgaatctgccgaggaaacgtgtacttgaagttcagtgagatggacgcccctctggaggatcctgtgacgaaagaagaaattcagaagaacatattcatcatattttaccaaggagagcagctcaggcagaaaatcaagaagatctgtgatgggtttcgagccactgtctacccttgcccagagcctgcggtggagcgcagagagatgttggagagcgtcaatgtgaggctggaagatttaatcaccgtcataacacaaacagagtctcaccgccagcgcctgctgcaggaagccgctgccaactggcactcctggctcatcaaggtgcagaagatgaaagctgtctaccacatcctgaacatgtgcaacatcgacgtcacccagcagtgtgtcatcgccgagatctggttcccggtggcagatgccacacgtatcaagagggcactggagcaaggcatggaactaagtggctcctccatggcccccatcatgaccacagtgcaatctaaaacagcccctcccacatttaacaggaccaataaattcacagctggcttccagaatattgttgatgcctatggtgtcggcagctaccgggagataaacccagccccctacaccatcatcactttccccttcctgttcgctgtgatgtttggagactgtggtcatggaaccgtgatgctcctggctgcactttggatgattctgaatgagagacgcttgctctcccagaagacagacaatgagatttggaacaccttcttccacgggcgctatctgatcctacttatgggcatcttctccatctacacgggtttgatctacaatgactgcttctccaagtccttgaacatctttggctcttcttggagtgtccaacccatgttcagaaacggcacatggaatactcatgtaatggaggaaagtctatatctgcagctggacccagccataccaggagtgtattttggaaatccatacccgtttgggattgatccgatttggaacttggcttcaaacaaactcacatttctgaactcgtataaaatgaagatgtcggtgatcctgggaattgtccagatggtttttggtgtcatcctcagccttttcaatcacatatacttcagaagaactctcaacatcattctgcaatttatccctgagatgatttttatcctgtgtctgtttggatacctggttttcatgatcattttcaaatggtgctgctttgacgtccacgtatctcagcacgcccccagcatcctcatccacttcatcaacatgtttctgtttaactacagtgactcttccaacgcacccctctacaaacatcagcaagaagtccaaagtttctttgtggttatggctttgatttctgtgccgtggatgcttctgattaagccgtttattcttagagccagtcatcggaaatcccagctgcaggcatccaggatccaagaagatgccactgagaacattgaaggtgatagctccagcccttctagccgttctggccagaggacttctgcagatacccacggggctctggacgaccatggagaagagttcaactttggagacgtctttgtccaccaagccatccacaccatcgagtactgcctgggctgcatttcaaacacagcctcctacctgcggctctgggccctcagcctggctcatgcacaactgtctgaagtgctctggactatggtgatgaacagcggccttcagacgcgaggctggggaggaatcgtcggggtttttattatttttgccgtatttgctgtcctgacagtagccatccttctgatcatggagggcctctctgctttcctgcacgccctgcgactgcactgggttgagttccagaacaagttctatgtcggggatggttacaagttttctccattctcctttaaacacatcctggatggcacagccgaggagtaggctgagggctgcacctcccacggtggtcaccatgccaatgaaggaagttcagtcttgtctttgatatcagcccctgcaaggcgctcaatgggaaggttgttcttggctcacctgaagcatgaaactgtgtattatttggacgtcagcctgtggatttgatacgacttaaccacgtcagaggaaggactttggcaagtgatattgtcttcatgtggggtattaattctcaaataataaaataattgacaaatgaggggagaatgctaaacagatgtcttcttgcaatattttaaatattgtatttgagaaaataaacatctgagtcattcaaaaaaaaaaaaaaa

SEQ ID NO: 896 - DNA, 2237 bp, Homo sapiens
  CDS (135)..(1991)
gggaagcccgagcggctgaactcggcagctccaacccaactcggcttaactccgcctcaccgagcccagtccaagactctgtgctccctaggtttgcaacagctctctgatcatcttcttcaattcctgctaggatgccgtggcaagcatttcgcagatttggtcaaaagctggtacgcagacgtacactggagtcaggcatggctgagactcgccttgccagatgcctaagcaccctggatttagtggccctgggtgtgggcagcacattgggtgcaggcgtgtatgtcctagctggcgaggtggccaaagataaagcagggccatccattgtgatctgctttttggtggctgccctgtcttctgtgttggctgggctgtgctatgcggagtttggtgcccgggttccccgttctggttcggcatatctctacagctatgtcactgtgggtgaactctgggccttcaccactggctggaacctcatcctctcctatgtcattggtacagccagtgtggcccgggcctggagctctgcttttgacaacctgattgggaaccacatctctaagactctgcaggggtccattgcactgcacgtgccccatgtccttgcagaatatccagatttctttgctttgggcctcgtgttgctgctcactggattgttggctctcggggctagtgagtcggccctggttaccaaagtgttcacaggcgtgaaccttttggttcttgggttcgtcatgatctctggcttcgttaagggggacgtgcacaactggaagctcacagaagaggactacgaattggccatggctgaactcaatgacacctatagcttgggtcctctgggctctggaggatttgtgcctttcggcttcgagggaattctccgtggagcagcgacctgtttctatgcatttgttggtttcgactgtattgctaccactggagaagaagcccagaatccccagcgttccatcccgatgggcattgtgatctcactgtctgtctgctttttggcgtattttgctgtctcttctgcactcaccctgatgatgccttactaccagcttcagcctgagagccctttgcctgaggcatttctctacattggatgggctcctgcccgctatgttgtggctgttggctccctctgtgctctttctaccagcctcctgggctccatgttccccatgcctcgggtgatctacgcgatggcagaggatggcctcctgttccgtgtacttgctcggatccacaccggcacacgcaccccaatcatagccaccgtggtctctggcattattgcagcattcatggcattcctcttcaaactcactgatcttgtggacctcatgtcaattgggaccctgcttgcttactccctggtgtcgatttgtgttctcatcctcaggtatcaacctgatcaggagacaaagactggggaagaagtggagttgcaggaggaggcaataactactgaatcagagaagttgaccctatggggactatttttcccactcaactccatccccactccactctctggccaaattgtctatgtttgttcctcattgcttgctgtcctgctgactgctctttgcctggtgctggcccagtggtcagttccattgctttctggagacctgctgtggactgcagtggttgtgctgctcctgctgctcattattgggatcattgtggtcatctggagacagccacagagttccactccccttcactttaaggtgcctgctttgcctctcctcccactaatgagcatctttgtgaatatttaccttatgatgcagatgacagctggtacctgggcccgatttggggtctggatgctgattggctttgctatctacttcggctatgggatccagcacagcctggaagagattaagagtaaccaaccctcacgcaagtctagagccaaaactgtagaccttgatcccggcactctctatgtccactcagtttgacatcgtcacacctaaatgctgtctggtcccctgcacaataatggagagtactcctgaccccagtgacagctagccctcccctgtgatggtggtggtggatactaatacagttctgtacgatgtgaaggatgtgtctttgctatttcttgtctattttaacccgtctgcttctaaatgatgtctagctgcttaccaactttaaaaaatgatattaaaagaaagtagaaaaataaaaaaaaaaaa

SEQ ID NO: 897 - DNA, 6158 bp, Homo sapiens
  CDS (57)..(4559)
atgattctgacaatggagatattaattatgattatgttcatgaattgtcattggaaatgaagcgtcagaagatacagagggaattaatgaagctggaacaagaaaacatggagaagagagaagaaattatcattaaaaaggaggtttcaccagaagtggttagatcaaaattgtccccgtcaccttctctaagaaagtctagcaaatctccgaagcgaaaatcaagcccgaagtcgtcttcagctagcaagaaagataggaagacatctgcagtatcttctcccctgttggaccagcagagaaattcaaaaaccaaccaaagtaaaaagaaaggaccacgtactcctagtccaccccctcctataccagaagatatcgctctggggaaaaaatacaaagaaaaatataaagtaaaagacaggatagaagaaaaaacaagagatggaaaggacagaggacgagattttgaacgacaaagagaaaagagagacaagccaaggtctacttccccagcaggacagcatcattctcctatatcttctagacatcactcatcttcctcacaatcaggatcatctattcaaagacattctccttctcctcgtcgaaaaagaactccttcaccatcttatcagcggacactaactccacctttacgacgctctgcctctccttatccttcacattctttgtcgtctccccagagaaagcagagtcctccaagacatcgctctccaatgcgagagaaagggagacatgatcatgaacgaacttcacagtctcatgatcgacgccacgaaaggagggaagatactaggggcaaacgagacagagaaaaggactcaagagaagaacgagaatatgaacaggatcagagctcttctagagaccacagagatgacagagaacctcgagatggtcgggatcggagagatgccagagatactagggaccgaagggaactaagagactccagagacatgcgggactcaagggagatgagagattatagcagagataccaaagagagccgtgatcccagagattctcggtccactcgtgatgcccatgactacagggaccgtgaaggtcgagatactcatcgaaaggaggatacatatccagaagaatcccggagttatggccgaaaccatttgagagaagaaagttctcgtacggaaataaggaatgagtccagaaatgagtctcgaagtgaaattagaaatgaccgaatgggccgaagtagggggagggttcctgagttacctgaaaagggaagtcgaggctcaagaggttctcaaattgatagtcacagtagtaatagcaactatcatgacagctgggaaactcgaagtagctatcctgaaagagatagatatcctgaaagagacaacagagatcaagcaagggattcttcctttgagagaagacatggagagcgagaccgtcgtgacaacagagagagagatcaaagaccaagctcaccaattcgacatcagggaaggaatgacgagcttgagcgtgatgaaagaagagaggaacgaagagtagacagagtggatgataggagagatgaaagggctagagagagagatcgggaacgagaacgagacagggagcgggagagagagagggaacgtgaacgggatcgggaaagagaaaaagagagagaactagaaagagagcgtgctagggaacgggagagagaaagagaaaaagagagagatcgtgaaagggatagagaccgagaccacgatcgagagcgggaaagagagagggaacgagacagggaaaaagaacgggaacgagaaagagaagagagagagagggagagagagcgagaacgggagagagagcgagagcgagaacgggaacgagaaagagcgagagaaagggataaagaacgagaacgccaaagggattgggaagacaaagacaaaggacgagatgaccgcagagaaaagcgagaagagatccgagaagataggaatccaagagatggacatgatgaaagaaaatcaaagaagcgctatagaaatgaagggagtcccagccctagacagtccccgaagcgccggcgtgaacattctccggacagtgatgcctacaacagtggagatgataaaaatgaaaaacacagactcttgagccaagttgtacgacctcaagaatctcgttctcttagtccctcgcacctcacagaagacagacagggtagatggaaagaggaggatcgtaaaccagaaaggaaagagagttcaaggcgctacgaagaacaggaactcaaggagaaagtttcttctgtagataaacagagagaacagacagaaatcctggaaagctcaagaatgcgtgcacaggacattataggacaccaccagtctgaagatcgagagacatctgatcgagctcatgatgaaaacaagaagaaagcaaaaattcaaaagaaaccaattaagaaaaagaaagaggatgatgttggaatagagaggggtaacatagagacaacatctgaagatggtcaagtattttcaccaaaaaaaggacagaaaaagaaaagcattgaaaaaaaacgtaaaaaatccaaaggtgattctgatatttctgatgaagaagcagcccagcaaagtaagaagaaaagaggcccacggactccccctataacaactaaagaggaattggttgaaatgtgcaatggtaagaatggtattctagaggactcccagaaaaaagaagatacagcattcagtgactggtctgatgaggatgtccctgaccgtacagaggtgacagaagcagagcatactgccaccgccacgactcctggtagtaccccttctcctctatcttctcttcttcctcctccaccgcctgtggctactgccactgctacaactgtgcctgcaactcttgctgccactactgctgctgccgccacctctttcagcacatctgccatcactatttccacctctgccacccccaccaataccaccaataatacttttgccaatgaagactcacacagaaaatgccacagaacacgagtagaaaaagtagagacgcctcacgtgactatagaagatgcacagcatcgcaagcctatggatcaaaagaggagcagcagcctcgggagcaatcggagtaaccgtagtcatacgtctggtcgtcttcgctccccatccaatgattcagcccatcgaagtggagatgaccaaagtggtcgaaagagagtactgcacagtggctcaagagatagagaaaaaacaaaaagcctggaaatcacaggagagagaaaatctaggattgatcagttaaagcgtggagaacccagtcgaagtacttcttcagatcgccaggattcaagaagccatagttcaagaagaagttctccagagtcagatcgacaggtccattcaagatctgggtcatttgatagcagagacaggcttcaagaacgagatcgatatgaacacgacagagagcgcgagagagagaggagagatacgaggcagagagaatgggaccgagatgctgataaagattggccacgcaacagggatcgagatagattgcgagaacgagaacgagagagagaacgagacaaaaggagagacttggatagggaaagagagagactaatttctgattctgttgaaagggacagggacagagacagagacagaacttttgagagttctcaaatagagtctgtgaaacgctgtgaagcaaaactggaaggtgaacatgaaagggatctagaaagcacttcccgagactctctagccttggataaagagagaatggataaagatctgggatctgtgcagggatttgaagatacaaataaatccgagagaactgagagtctggaaggagatgacgagtccaagttagatgatgcacattcattaggctctggtgctggagaaggatacgagccaatcagtgatgacgaactagatgaaattctggcaggtgatgcagaaaagagggaggaccaacaggatgaggagaagatgccagatcccttagatgtgatagatgtggattggtctggtcttatgccaaagcatccaaaagaaccacgagagcctggggctgcactcttaaaattcacacctggagctgttatgctaagagttgggatttctaaaaagttggcaggttctgaactctttgccaaagtcaaagaaacatgtcagagacttttagaaaaacccaaagatgcagacaatctctttgaacatgaattgggggctctcaatatggctgcattactacgaaaagaagaaagagcaagtcttcttagtaatcttggcccatgttgtaaggcgttgtgcttcagacgggattctgcaattcgaaagcagcttgttaaaaatgagaagggcaccataaaacaagcttacacgagtgctccaatggtagacaatgaattacttcgattgagtcttcggttatttaagcggaagactacttgccatgctccaggacatgaaaagactgaagataataaactttcacagtccagtatccaacaggaactgtgtgtgtcttaagaccgaagttcaatatggtatttttggtactgtcttccttcagcagtgcatattcttttgcaaagttctttggtttgacaagcattagtgacaaaggcagaaaagatttatcagccatgctaaaagagtgaagaattttgatctttagagacactagttttggccaacttaagattttacgttaatttttacatagtatttgacactcatgcaaaataatgtgaaaacatctagatttagtagtttattctgcgccttttgttaaaactgaagattttggaaaatggttgtcactgctcttccagcctatgaatatttttgtgaaatggaaccatggatttatgtctggatcatccatacagaaccaacaattttattcaaaaacaatgtgttcatcaaagtaattgctcacattgtgcagtactatgttgtacagaccacgtgaaagggaatgctggtctagctggcgtggtatgtttataggcgaatttcagcagaaggaagccaaaatagttttttccttttgaaagttttttaaaaattatttcatgggtcttttttttaattaatatgtgtgcattgttacaatgtatgttggatgtcttttgaccctaaatgctttttttgttatcagagattgtgtactatttttatttttaataaatgtatcttccctttccttgttttagatttactttgctcttcgttaatcttattcctgatgatctagaacattagtcatcaacattacatgtttcatgcttcagatattttactgcttgtgtccttattgttggacagctttaaacagagttgatgtacttcaaatatagctcattgatacttaaggcatcttcttggaatgtggcttttgaagaaaaaaattactcaaagcaaatcaagagttaacaaacctaacgtaacctgaggtttaatattctactatcatattttttagagctataacttttgattatattaaactgcctccagctgtactatgtaaaacagatttacttttaaaaattacagtatacctgctttgttctatatgtatatgtttaactcatgaagtggactcttagaaggatttgaaatggactctggccacagaatttgtgagcagacagtagtagtgataataataaaagaaggcaatcaaaatttaattttatcatgccctctcacaggtttgtgttataattgtaagcccatattacttgtgttagtagttttgtctctataggtaacataatgacagtggtgtaaagtttctgttcaagaaacatatgttgtaaagttactttatacaagatacctgccaaaggaaatggtcttactttcaaatgactttgaaagcatgtataattgcaaacagagcaggagaagactttaatcagaatttccttgtgtccttttcctttactaagtgttttgaataaagaaaaaaaaaatgtatgacctcagagaatgaatacccttcaggaagccacttcctgattttagtggataatattgttctctgtagcacaaagatttaaagtcctagaatttctaatcctagttctcagaattgtagaatatgacaaaaataag

SEQ ID NO: 898 - DNA, 2320 bp, Homo sapiens
  CDS (511)..(2190)
cacccctctaggatcccagcccagctggtgctgggctcagaggagaaggccccgtgttgggagcaccctgcttgcctggatgggacaatgtttcctgtggatgtatgaatcacataaatggaaaggaaagagacaaggaagggagaggtcaggagagcgcttgattggaggagaagggccagagaatgtcgtcccagccagcagggaaccagacctcccccggggccacagaggactactcctatggcagctggtacatcgatgagccccaggggggcgaggagctccagccagagggggaagtgccctcctgccacaccagcataccacccggcctgtaccacgcctgcctggcctcgctgtcaatccttgtgctgctgctcctggccatgctggtgaggcgccgccagctctggcctgactgtgtgctgtggcaggccctggcctgccccagccctgtggatttctgtggctggggacaggccccgggcagtgcctgctgctgttttcatggtcctcctgagctccctgtgtttgctgctccccgacgaggacgcattgcccttcctgactctcgcctcagcacccagccaagatgggaaaactgaggctccaagaggggcctggaagatactgggactgttctattatgctgccctctactaccctctggctgcctgtgccacggctggccacacagctgcacacctgctcggcagcacgctgtcctgggcccaccttggggtccaggtctggcagagggcagagtgtccccaggtgcccaagatctacaagtactactccctgctggcctccctgcctctcctgctgggcctcggattcctgagcctttggtaccctgtgcagctggtgagaagcttcagccgtaggacaggagcaggctccaaggggctgcagagcagctactctgaggaatatctgaggaacctcctttgcaggaagaagctgggaagcagctaccacacctccaagcatggcttcctgtcctgggcccgcgtctgcttgagacactgcatctacactccacagccaggattccatctcccgctgaagctggtgctttcagctacactgacagggacggccatttaccaggtggccctgctgctgctggtgggcgtggtacccactatccagaaggtgagggcaggggtcaccacggatgtctcctacctgctggccggctttggaatcgtgctctccgaggacaagcaggaggtggtggagctggtgaagcaccatctgtgggctctggaagtgtgctacatctcagccttggtcttgtcctgcttactcaccttcctggtcctgatgcgctcactggtgacacacaggaccaaccttcgagctctgcaccgaggagctgccctggacttgagtcccttgcatcggagtccccatccctcccgccaagccatattctgttggatgagcttcagtgcctaccagacagcctttatctgccttgggctcctggtgcagcagatcatcttcttcctgggaaccacggccctggccttcctggtgctcatgcctgtgctccatggcaggaacctcctgctcttccgttccctggagtcctcgtggcccttctggctgactttggccctggctgtgatcctgcagaacatggcagcccattgggtcttcctggagactcatgatggacacccacagctgaccaaccggcgagtgctctatgcagccacctttcttctcttccccctcaatgtgctggtgggtgccatggtggccacctggcgagtgctcctctctgccctctacaacgccatccaccttggccagatggacctcagcctgctgccaccgagagccgccactctcgaccccggctactacacgtaccgaaacttcttgaagattgaagtcagccagtcgcatccagccatgacagccttctgctccctgctcctgcaagcgcagagcctcctacccaggaccatggcagccccccaggacagcctcagaccaggggaggaagacgaagggatgcagctgctacagacaaaggactccatggccaagggagctaggcccggggccagccgcggcagggctcgctggggtctggcctacacgctgctgcacaacccaaccctgcaggtcttccgcaagacggccctgttgggtgccaatggtgcccagccctgagggcagggaaggtcaacccacctgcccatctgtgctgaggcatgttcctgcctaccatcctcctccctccccggctctcctcccagcatcacaccagccatgcagccagcaggtcctccggatcact

SEQ ID NO: 899 - DNA, 774 bp, Homo sapiens
  CDS (463)..(657)
gatctacttatggttgatggagcacattgatttggagtttcagatcttccaaagcactatttgttgtaataacttttctaaatgtagtgcctttaaaggaaaaatgaacacagggaagtgactttgctacaaataatgttgctgtgttaagtattcatattaaatacatgccttctatatggaacatggcagaaagactgaaaaataacagtaattaattgtgtaattcagaattcataccaatcagtgttgaaactcaaacattgcaaaagtgggtggcaatattcagtgcttaacacttttctagcgttggtacatctgagaaatgagtgctcaggtggattttatcctcgcaagcatgttgttataagaattgtgggtgtgcctatcataacaattgttttctgtatcttgaaaaagtattctccacattttaaatgttttatattagagaattctttaatgcacacttgtcaaatatatatatatagtaccaatgttacctttttattttttgttttagatgtaagagcatgctcatatgttaggtacttacataaattgttacattattttttcttatgtaatacctttttgtttgtttatgtggttcaaatatattctttccttaaactcttctttgttgtttttaacaattgatatttgaaactttttttttttttggcttcttactggtcttccaatagaacaagaactggcaataaaaggtgattacagtagtaactgggaagacaagttaaaaaaaaaaaaaaa

SEQ ID NO: 900 - DNA, 1714 bp, Homo sapiens
  CDS (277)..(1647)
tttcgtgaactagctcagctccgagctcgcggaaccacgcccccgggagactctggcccggccagcgcgggccaggtcttcagtcctatatcgccctgccttgggaaaaggtgcaggggcctctcgccgcctcgtcgggcccttcctctctacctgcctctccaacccctctcggccccgagccacccggcagcgggggtgggtgtgcagaggtgcggcgtccagaacccggctcctgcagaggctctgggtggcagcagccctgttaccgcttagatggcgcgcaggacagagccccccgacgggggctggggatgggtggtggtgctctcagcgttcttccagtcggcgcttgtgtttggggtgctccgctcctttggggtcttcttcgtggagtttgtggcggcgtttgaggagcaggcagcgcgcgtctcctggatcgcctccataggaatcgcggtgcagcagtttgggagcccggtaggcagtgccctgagcacgaagttcgggcccaggcccgtggtgatgactggaggcatcttggctgcgctggggatgctgctcgcctcttttgctacttccttgacccacctatacctgagtattgggttgctgtcaggctctggctgggctttgaccttcgctccgaccctggcctgcctgtcctgttatttctctcgccgacgatccctggccaccgggctggcactgacaggcgtgggcctctcctccttcacatttgccccctttttccagtggctgctcagccactacgcctggagggggtccctgctgctggtgtctgccctctccctccacctagtggcctgtggtgctctcctccgcccaccctccctggctgaggaccctgctgtgggtggtcccagggcccaactcacctctctcctccatcatggccccttcctccgttacactgttgccctcaccctgatcaacactggctacttcattccctacctccacctggtggcccatctccaggacctggattgggacccactacctgctgccttcctactctcagttgttgctatttctgacctcgtggggcgtgtggtctccggatggctgggagatgcagtcccagggcctgtgacacgactcctgatgctctggaccaccttgactggggtgtcactagccctgttccctgtagctcaggctcccacagccctggtggctctggctgtggcctacggcttcacatcaggggctctggccccactggccttctccgttctgcctgaactaatagggactagaaggatttactgtggcctgggactgttgcagatgatagagagcatcggggggctgctggggcctcctctctcaggctacctccgggatgtgtcaggcaactacacggcttcttttgtggtggctggggccttccttctttcagggagtggcattctcctcaccctgccccacttcttctgcttctcaactactacctccgggcctcaggaccttgtaacagaagcactagatactaaagttcccctacccaaggaggggctggaaggaggactgaactccacagagtcaggcccagaaagccaaagcttgacagctccaggtcttctcttgccacgtcttggtctccacagaaccacagtgccttaagattcttgatctgcctccccctagagcaggcctggggctcctgcaatgtgtgtgccaacccttt

SEQ ID NO: 901 - DNA, 2094 bp, Homo sapiens
  CDS (220)..(1959)
tttcgtgtggaaaggagggggccctcctgagtagatctgtgggtgattccttcgaggacgcctcgtcttcccgtctgcccttttatttgtcagcgagggagtccccatggtctctgttcaagttctggaaactttctctttgggtgggcttaatcacctgctactaaatcgtagaactgcccagggccctttctaatattggtcacaaacgtgaggagtatgtcagaaaacagaaaaccgctgctgggctttgtaagcaaactcactagtgggactgcacttgggaactcaggcaagactcactgccccctgtgcttggggcttttcaaagcccccaggctcttgccttgtttgcatacagtttgcaccacgtgtctggagcagctggagcccttctcagtagtggacatccgagggggagactctgacacaagctctgaggggtcaatattccaggaactcaagccacgaagtctgcagtcgcagatcggcatcctttgtcctgtatgtgatgctcaggtggacctgcccatgggtggagtgaaggctttaaccatagaccacctggccgtgaatgatgtgatgctggagagcctacgtggggaaggccagggcctggtgtgtgacctgtgcaacgacagggaagtagagaagaggtgtcagacctgcaaagccaacctctgccacttctgctgccaggctcataggcggcagaagaaaacgacttaccacaccatggtggacctaaaagacttgaaaggctacagccggattgggaagcccatcctgtgtcctgttcaccctgcagaggaactgaggctgttctgtgagttctgtgaccggcccgtgtgccaggattgtgtggtgggggagcatcgggaacacccctgtgacttcaccagcaatgtcatccacaagcatggggactctgtgtgggagctcctcaaaggtactcagccccacgtggaggccctggaggaagccctggctcagatccacataataaacagtgccctccagaagcgagtggaggcagtggcagctgatgtccggacattctcggagggctacattaaggccattgaggagcatcgggacaagctgctgaagcagctggaagacatacgggcccagaaggaaaattccctgcagctgcagaaggcccagctggaacagttactggcagacatgcggactggagtggagttcaccgagcacttgctgaccagcggctcagacttggagatcctcatcaccaagagggtggtggtagaacggctcaggaagctgaacaaagttcaatatagcacccgtcctggagtaaatgataagatacgcttctgtcctcaggagaaagcaggccagtgccgtggctatgaaatttatggtacgattaataccaaagaggttgatccagccaaatgtgtcctacaaggagaagacctccacagagcccgggagaaacagacggcctctttcaccctgctttgtaaggatgccgcaggagaaatcatgggcaggggaggagacaacgttcaagttgccgttgtccctaaagataagaaagacagcccagtcagaacaatggtccaggataacaaggatgggacatactacatttcctacacccccaaggaacctggcgtctatactgtgtgggtctgcatcaaagaacagcatgtgcagggctcgccattcactgtgatggtgaggagaaagcaccgcccacactcaggcgtgtttcactgctgcaccttctgctccagcgggggccagaaaaccgctcgctgcgcctgtggaggcaccatgccaggtgggtacctaggctgtggccatggacacaaaggccacccaggtcatccccactggtcatgctgtggaaaatttaatgagaaatctgaatgcacatggacaggtgggcagagcgcaccgaggagtctacttaggactgtggctctctgatgggtttgtgctcagccttttaaagctgcaggcagcaccacttgagatttccagaggacccagaccttcgttcattctaaagagactgatagaattaaaaacaaagtgccttatcttgcaaaaaaaaaaaaa

SEQ ID NO: 902 - DNA, 1735 bp, Homo sapiens
  CDS (214)..(1581)
gcgtggggaattccacgcagccttaagtcggcccaacacggtttctgcctcacggattatttatatatccattgcttattggctgctggcaaacactcgctcttctcgttggctgaaactgtcgggagaagttctgcgaaggctgctccttgcggcgttgggactgagggtcacaggcacctatatttccgtttccggttcgcctccggagccatggcggcggcactgaagtgtctactgacattaggaagatggtgccccggccttggagtggctccccaggcccgggcgctcgccgccttagtacccggagtgacccaggtagataacaagtccggtttcctgcagaagaggcctcatcgccagcaccctggcatcctaaagctgccgcacgtgcggctgccacaggcactggctaacggtgcccagttattgctacttgggagcgctgggcccactatggagaatcaggtgcaaacactgaccagttatctctggagcagacatttgcctgtagagccagaggagttgcaaagacgggctaggcatcttgagaaaaaattcctggaaaacccagacttatctcagacagaggagaaacttcgtggagcagtgctacacgcactacgtaaaactacctaccattggcaagaactgagctacactgagggactgagcctggtgtatatggcagcaagactggatggtggctttgcagcagtctccagagcattccatgagatccgggctcgaaatccagcatttcagccacaaactttgatggactttggctcaggtactggttctgtcacctgggctgctcacagtatttggggccagagcctacgtgaatatatgtgtgtggacagatcagctgccatgttggttttggcagaaaaactactgaaaggtggttcagaatctggggagccttatattccaggtgtctttttcagacagtttctacctgtatcacccaaggtgcagtttgatgtagtagtgtcagctttttccttaagtgaactgcccagcaaggctgaccgcactgaggtagttcaaaccttatggcgtaagacaggtcatttcctggtactggtggagaatggaacaaaagctgggcacagccttctcatggatgccagggatctggtccttaagggaaaagagaagtcacctttggaccctcgacctggttttgtctttgccccgtgtccccatgaactcccttgtccccagttgaccaacctggcctgtagcttctcacaggcgtaccatcccatccccttcagctggaacaagaaaccaaaggaagaaaagttctctatggtgatccttgctcgggggtctccagaggaggctcatcgctggccccgtatcactcagcctgtccttaaacggcctcgccatgtgcattgtcacttgtgctgtccagatgggcacatgcagcatgctgtgctcacagcccgccggcacggcagggatttgtatcgttgtgcccgtgtcagctcctggggagatcttttacctgtgcttactccgtctgcgtttcctccatctacggctcaggatccctctgagagttgatgaggatgtgtaacaagtattttcttctatcgtgcctgccagggctgaagctgcctggtatccaggaggggaatgctggtatccccatatgtctgtgtttgtttgagatttttaataataaataataaatttttgaagaaaaaaaaaaaaa

SEQ ID NO: 903 - DNA, 984 bp, Homo sapiens
  CDS (238)..(543)
atcgagacctcgagcaccctaggccgtgtggcggaattcacagccgggcggccgggcggggacgcgccccggactcttctcagttgagagtgcggttcctgggcaggtttccacaccagttcctttccgcgtccttcggccctggctctggctgcctggcggaggtggggtagcatttgtcatttgcacactgctggctttatctttggggctgcaccccgaggcaacaaatgcaggatgctctgtcacccacatgtccaccaccatctggtttgccttttggctactttgactttctccttaaatgcttcctgtgctgagcaaacattccacagccagcagagcaatggagagttcatggccactcttcccagtatcagcaagcaatttggggtgatcgtttggaagcctcagaggaaagatgtcatcaggcttcctgtggctttgtccttcagcagtggggctcggcttgctttcacctgccttaggaagatttctggcttccgagctctgatatggggagaagataagggctgggatctttgagtctgcccctagctgggtatgtgcgtccggtgtgcgggccttggagtttttggtaatgactcacttgtgctctttctgggatctgtctccctcccacatgaccccgtggggtccctgaatgactgttttagagtacccatgtgggttccctgagtcacagcaggggatgtttaataaggaggttagcactgagcttggggacgtgctgtcacaccagcaggacgctgcaggaaggagcaggctacttcctttcttgacgtgcaaataactcgtataggctaatcaacaggcttataagttaaaagggctaccgctcggccccttggggagttccatcccttcctctgtaacttggagatgtttgtttctgctgcagactcaaagggttgcgatgaagagtggtgggacttatttgagagcttaatccttcgctgggtt

SEQ ID NO: 904 - DNA, 3243 bp, Homo sapiens
  CDS (277)..(2031)
ttgggctcggagcggaagtgagactagggagtctgtccgcctttgttgacccgagaagcagagagcgagagggggaagaggagcgtgcaagcggaaaagacgggcctcttcctccgactcccgagcgcgaggccctcattttgggttctcagcgaacggcggcagcggcggcggctggaacaatcactcggccaagggcgacagccaactgctgtgagtgcacggggagaggcccaggcagcggcggcggcggcggctctcgggttgcggtgaagaatgtcagccactagcgtggatcagagacctaaagggcaaggaaataaagtttcagtacaaaacggttcgattcatcaaaaagatgctgtaaatgatgatgattttgagccatacttaagtagccagacaaatcagagtaacagctatccaccaatgtcagatccatacatgcctagttactatgctccatccattggatttccatattctcttggggaagcagcgtggtccacagctggagaccagcctatgccatatctgacaacctatggacaaatgagtaatggagaacatcactatataccagatggtgtatttagtcaacctggggcattaggaaatacccctccatttcttggtcaacatggatttaacttttttcctggtaatgctgatttctctacatgggggacaagtggatctcagggacaatcaacacaaagttctgcttatagtagcagttatggctatccacctagttctcttgggagagctatcactgatggacaggctggatttggcaatgatactttgagtaaggtgcctggcattagcagtattgagcaaggcatgactggactgaaaactggtggtgacctgacagctgcagtgacaaaaactgtaggtacagctttgagcagcagtggtatgactagcattgcaaccaatagtgtgcccccagttagcagtgcagcacctaaaccaacctcctgggctgccattgccagaaagcctgccaaacctcaaccgaaacttaaacccaagggcaatgtgggaattgggggttctgctgtaccaccacctcctataaaacacaacatgaatattggaacttgggatgaaaaagggtcagtggtaaaggctccaccaacccaaccagttctgcctcctcaaactataatccagcagcctcagccattaattcaaccaccaccattggtgcaaagccaactgcctcaacagcagcctcaaccaccacaaccacagcagcaacaaggacctcagccacaggcccagcctcaccaagtgcagcctcaacagcagcagctgcagaatcgctgggtagctcctcgtaacaggggagcaggcttcaaccagaacaatggagcgggcagtgaaaactttggtttaggtgttgtacctgtcagtgcttcaccttctagtgtagaagtgcatcccgtgctggaaaagctaaaggccataaacaactataatcccaaagactttgattggaatctgaagaatggacgtgtgtttataattaaaagctactctgaggatgacatacatcgttccattaaatactctatctggtgtagtactgagcatggtaataagcgtttggatgcagcttaccgttccctgaatgggaaaggcccactctatttactcttcagtgtgaatggcagtggacatttttgtggagtggctgaaatgaagtctgttgtggactataatgcgtatgctggtgtctggtctcaggataagtggaagggcaaatttgaagttaaatggatctttgtcaaagatgttcccaataaccaattacggcatattcgcttagaaaataatgacaacaaaccggttaccaattcaagggacactcaagaggtacccctagaaaaagctaagcaagtgcttaaaataattgctactttcaagcataccacctcaatctttgatgactttgcacattatgaaaagcgtcaagaagaggaggaagccatgcgtagggagagaaatagaaacaaacaataaccgtatgaagatgtcctgttaaatttacaacactaacgatgtagactctggaaatgcctaataagtcaaagaagacgtattaaagctcttttctgcttaaggtgacatctttgaacactttaacacaaagttgactcttctcgtaatggttttcatcagcgcatctgcccttatactcttcaccaaacacacttgagaactgtaacttcgtcaagcactttctgtcctgaagcttttaccagtatctgctgtcttttgtaattatgcatcctagctaaggcacagaagactgaatgaatgcaaggattcattaactctttgaatttgttaaatactaacagttaaccattagaagtggttcaatgatgtaagagtcacactgcttcaactttttctttgttgtagtttttaaattgtcgatttttagctatttgacagattaaaagcaaaataatcatgccatatttagtcctggagttcaagtctaaatgttgatgtgaaaaattattgtagtaaacttttaatatggcaaagcaaccttaagctctattttagccaaatgaaacataatctgaaattatattagaacatttcccttgtcttcaaactgtttggtgtaacagaatattgatatgcagcttggtggatttcaccagttaatgcacattcttcttccctcctccccccattaatatgtatactgaaaaatgtgcatttgtctgaggaattattttgtttgctaccacttaatgaatctcaaaattttgagtaaatgtacctcagtctaatcagactttttatgacctttataactacatttaaaacccttaattcctatttctgggtgtttgcgagcctgattgctatcatgaagtaaaaatttattactctaggtattcactagctaaataaacatagttcttgtttagcaagcatatgttgttcctcagctcttttctccagcttttgcagtgtcctggcatccttaaaatactttgaaaatatggccttgatccatggattaaatcagtatctaagtgaatgtgtcgatgtttaattgatcagatctatataagtgggaatacagcatatatctggatattctatttagtatcttttaaatctatttttccttattattatattatttggatctgaagcaatgttgttaataagggcaggttgtatgttgagaaagggtgaaaaggg

SEQ ID NO: 905 - DNA, 3981 bp, Homo sapiens
  CDS (1)..(2496)
atggagggcgacggcgggaccccatgggccctggcgctgctgcgcaccttcgacgcgggcgagttcacgggctgggagaaggtgggctcgggcggcttcgggcaggtgtacaaggtgcgccatgtccactggaagacctggctggccatcaagtgctcgcccagcctgcacgtcgacgacagggagcgcatggagcttttggaagaagccaagaagatggagatggccaagtttcgctacatcctgcctgtgtatggcatctgccgcgaacctgtcggcctggtcatggagtacatggagacgggctccctggaaaagctgctggcttcggagccattgccatgggatctccggttccgaatcatccacgagacggcggtgggcatgaacttcctgcactgcatggccccgccactcctgcacctggacctcaagcccgcgaacatcctgctggatgcccactaccacgtcaagatttctgattttggtctggccaagtgcaacgggctgtcccactcgcatgacctcagcatggatggcctgtttggcacaatcgcctacctccctccagagcgcatcagggagaagagccggctcttcgacaccaagcacgatgtatacagctttgcgatcgtcatctggggcgtgctcacacagaagaagccgtttgcagatgagaagaacatcctgcacatcatggtgaaggtggtgaagggccaccgccccgagctgccgcccgtgtgcagagcccggccgcgcgcctgcagccacctgatacgcctcatgcagcggtgctggcagggggatccgcgagttaggcccaccttccaaggaaacgggctgaatggggagctcatccgccaggtgctggcagctctgctccctgtgactggcaggtggcgctcccccggggaaggcttccgccttgagtctgaagtcatcatccgagtgacatgtcccctttcttccccacaagaaattacttctgaaaccgaggacctgtgtgaaaagcctgatgacgaagtgaaagaaactgctcatgatctggacgtgaaaagccccccggagcccaggagcgaggtggtgcctgcgaggctcaagcgggcctctgcccccaccttcgataacgactacagcctctccgagctgctctcacagctggactctggagtttcccaggctgtcgagggccccgaggagctcagccgcagctcctctgagtccaagctgccatcgtccggcagtgggaagaggctctcgggggtgtcctcggtggactccgccttctcttccagaggatcactgtcgctgtcctttgagcgggaaccttcaaccagcgatctgggcaccacagacgtccagaagaagaagcttgtggatgccatcgtgtccggggacaccagcaaactgatgaagatcctgcagccgcaggacgtggacctggcactggacagcggtgccagcctgctgcacctggcggtggaggccgggcaagaggagtgcgccaagtggctgctgctcaacaatgccaaccccaacctgagcaaccgtaggggctccaccccgttgcacatggccgtggagaggagggtgcggggtgtcgtggagctcctgctggcgcggaagatcagtgtcaacgccaaggatgaggaccagtggacagccctccactttgcagcccagaacggggacgagtctagcacacggctgctgttggagaagaacgcctcggtcaacgaggtggactttgagggccggacgcccatgcacgtggcctgccagcacgggcaggagaatatcgtgcgcatcctgctgcgccgaggcgtggacgtgagcctgcagggcaaggatgcctggctgccactgcactacgctgcctggcagggccacctgcccatcgtcaagctgctggccaagcagccgggggtgagtgtgaacgcccagacgctggatgggaggacgccattgcacctggccgcacagcgcgggcactaccgcgtggcccgcatcctcatcgacctgtgctccgacgtcaacgtctgcagcctgctggcacagacacccctgcacgtggccgcggagacggggcacacgagcactgccaggctgctcctgcatcggggcgctggcaaggaggccgtgacctcagacggctacaccgctctgcacctggctgcccgcaacggacacctggccactgtcaagctgcttgtcgaggagaaggccgatgtgctggcccggggacccctgaaccagacggcgctgcacctggctgccgcccacgggcactcggaggtggtggaggagttggtcagcgccgatgtcattgacctgttcgacgagcaggggctcagcgcgctgcacctggccgcccagggccggcacgcacagacggtggagactctgctcaggcatggggcccacatcaacctgcagagcctcaagttccagggcggccatggccccgccgccacgctcctgcggcgaagcaagacctagctggctgcctgcggagaccgggggtccacgtggggctcttgtcctgtcctgtgttcctcgtggggatggaacgatcctgcgtggggccccgttgtggcttacctaaatgttaaccaagcagaggtgacatggtgccatcaggaggcggctgctgctgaccggagtgtcccctccaggtgaagctggctcaggtgcacatgcccgctccatcatcgatctaggcacctgctgtctgaagggaccgtgggtcagaatcatttcgttgtgctcctaatgggtcgctgaggctggtctctcagtgatgaagccccaggcgtggaagcatccactctctcctgaggcgagccaccttgggttgctggagctcaccagtcttgagggaggtgcaggggaaactgtgttttttatcttcatacatgacggtgggcagagaggcctgtcttaaagtttccatggaattgttttataaaatatcttaagagatgaataccttatcagctgttgcttgaaacctgttaaaaatgttcataacattggatagtctagtctctaaatgatgactaagtagtggggttggctttgaaaacaatgttttatgcaacaaggaacgaatggtagcagccagctttgcggggcgtatgtgtggccagctcttaaccattccagtctattacttgggtgagtccttgtggacaaccacacacacgtgcccacatggtactagctgccgttcgtttctcgttgcctaagatgttttggcaactctagagccacaggcctaagagtcattaaaaaattctccctttgtaacctcagtgctggggactgaggcgagccccctcaggtcgctggagtgcaccagtcttggggaagaggtgcaggagaagctgtgttttttatctccacacgcagtatgaagataaaattacatagtattacctagacatagacagtattacctaggtagatgcactgctcacctgcgcccttcccagctctcatttttgttaggtgatttgggatagggatagtgttttggggtatggggggagtgtttctgacctgctttgcagacgtgcctccgcacctcagcagtttggggtgtggccccagggcggttcttggatgtaaaagatgtggccatctagcctcgtaacttcactgtcacctgtgtcccatagggtgccttctgaatactgttattagaataagtttgttgcagaacgtgaccctgcgtgcaaacatgtaccgtggcctggtatatgatagagattgatattaatgtaccatgtatgttaatgtgaatctgtgggcaggatacttttccatggcaggaaatatccaagctgttgaaactggctatgttttaatatgcctcattgtgcctttactgttgtgtggactgcgtgagggacaagaagttccatttgatgtcaataaagcaaagtacttgcctacttttttgaaaaaaaaaaaaaaaaa

SEQ ID NO: 906 - DNA, 859 bp, Homo sapiens
  CDS (44)..(655)
gtagttccagaaaataggactgaccaagaagcagaaaagcaagatgaatgatgtgaagcttgctgtcttgggtggtgaaggaacaggcaaatctgcccttacagtgaggtttcttactaagcgattcattggagaatatgcttctaattttgaatctatctataagaagcacttgtgtttggaaaggaaacaactaaatctagaaatatatgacccttgttctcaaacacagaaagcaaaattctccctcacaagtgagcttcactgggcagatgggtttgttattgtgtatgacatcagtgataggtcttcatttgcttttgcaaaagcgctgatctacagaatccgggagccacaaactagtcattgtaaaagagctgtggaatcagcagtgtttttggttggcaacaaacgagatctttgtcatgtgcgagaggttggctgggaagaagggcaaaagctggcactggaaaaccgatgccaattctgtgaactgtctgcagcagagcagtctctggaggtggaaatgatgtttatcagaattatcaaggacatcctgataaacttcaaactcaaagaaaagagacgtcccagtggatctaaatcaatggccaaattgatcaataatgtatttggaaagagaaggaaatctgtttagtagacaggtaatcctgggagatttcctatatcagagagtttcaaacattcacatgataattaaactaacctttgtatgcaatttttttttggtaaaaagaattctcttggagatatgaaatgattgagtatgaaccacagctgtgttttcaaatatgtagtttgcctttttggttgttgtaccctgctcactctccttcat

SEQ ID NO: 907 - DNA, 3273 bp, Homo sapiens
  CDS (247)..(2361)
ataaaattggctgcccaacattctgaactactaaggggaatttgctgtaggagaaccctaaatctcagaaagagatgacattaagctttgctcttatgggccgagaattagttaatgatttaagcaacttgatttaggggtacctctagtacttctctgctaaagcatttgtccagacaccgcggatggcttgcaagacgcctttcttacgttctttttattcaagagcgagatgtgcataagggcatgtttgccaccaatgtgactgaaaatgtgctgaacagcagtagagtacaagaggcaattgcagaagtggctgctgaattaaaccctgatggttctgcccagcagcaatcaaaagccgttaacaaagtgaaaaagaaagctaaaaggattcttcaagaaatggttgccactgtctcaccggcaatgatcagactgactgggtgggtgctgctaaaactgttcaacagcttcttttggaacattcaaattcacaaaggtcaacttgagatggttaaagctgcaactgagacgaatttgccgcttctgtttctaccagttcatagatcccatattgactatctgctgctcactttcattctcttctgccataacatcaaagcaccatacattgcttcaggcaataatctcaacatcccaatcttcagtaccttgatccataagcttgggggcttcttcatacgacgaaggctcgatgaaacaccagatggacggaaagatgttctctatagagctttgctccatgggcatatagttgaattacttcgacagcagcaattcttggagatcttcctggaaggcacacgttctaggagtggaaaaacctcttgtgctcgggcaggacttttgtcagttgtggtagatactctgtctaccaatgtcatcccagacatcttgataatacctgttggaatctcctatgatcgcattatcgaaggtcactacaatggtgaacaactgggcaaacctaagaagaatgagagcctgtggagtgtagcaagaggtgttattagaatgttacgaaaaaactatggttgtgtccgagtggattttgcacagccattttccttaaaggaatatttagaaagccaaagtcagaaaccggtgtctgctctactttccctggagcaagcgttgttaccagctatacttccttcaagacccagtgatgctgctgatgaaggtagagacacgtccattaatgagtccagaaatgcaacagatgaatccctacgaaggaggttgattgcaaatctggctgagcatattctattcactgctagcaagtcctgtgccattatgtccacacacattgtggcttgcctgctcctctacagacacaggcagggaattgatctctccacattggtcgaagacttctttgtgatgaaagaggaagtcctggctcgtgattttgacctggggttctcaggaaattcagaagatgtagtaatgcatgccatacagctgctgggaaattgtgtcacaatcacccacactagcaggaacgatgagttttttatcacccccagcacaactgtcccatcagtcttcgaactcaacttctacagcaatggggtacttcatgtctttatcatggaggccatcatagcttgcagcctttatgcagttctgaacaagaggggactggggggtcccactagcaccccacctaacctgatcagccaggagcagctggtgcggaaggcggccagcctgtgctaccttctctccaatgaaggcaccatctcactgccttgccagacattttaccaagtctgccatgaaacagtaggaaagtttatccagtatggcattcttacagtggcagagcacgatgaccaggaagatatcagtcctagtcttgctgagcagcagtgggacaagaagcttcctgaacctttgtcttggagaagtgatgaagaagatgaagacagtgactttggggaggaacagcgagattgctacctgaaggtgagccaatccaaggagcaccagcagtttatcaccttcttacagagactccttgggcctttgctggaggcctacagctctgctgccatctttgttcacaacttcagtggtcctgttccagaacctgagtatctgcaaaagttgcacaaatacctaataaccagaacagaaagaaatgttgcagtatatgctgagagtgccacatattgtcttgtgaagaatgctgtgaaaatgtttaaggatattggggttttcaaggagaccaaacaaaagagagtgtctgttttagaactgagcagcacttttctacctcaatgcaaccgacaaaaacttctagaatatattctgagttttgtggtgctgtaggtaacgtgtggcactgctggcaaatgaaggtcatgagatgagttccttgtaggtaccagcttctggctcaagagttgaaggtgccgtcgcagggtcaggcctgccctgtcccgaagtgatctcctggaagacaagtgccttctccctccatggatctgtgatcttcccagctctgcatcaacacagcagcctgcagataacacttggggggacctcagcctctattcgcaactcataatccgtagactacaagatgaaatctcaataaattatttttgagtttattaaagattgacattttaagtacaacttttaaggactaattactgtgatggacacagaaatgtagctgtgttctggaactgaatcttacatggtatacttagtgctgctgggtaatttgttggtatattatctggttagtggttaatgcttcctttaaaaataattgagtcatccattcactctttttcagttttatctgtcaatagtagctacatttttaatgggagcaccttttatcccaaagtgctttataaattgagtggactgatatatatcacacccaggtatcactgtgctgtcctttgctgtcagatttagaaatgtttttaagagctatgtgaaaacagacaatattagtttaggtcgggaactgagatattgtaatcaaatagttaacatcaggaagttaatttggctggcttctagggaaacttggccagtgaccagcaaatatatttagaacccttcctgttttatgtctgtacctcgtccacccctcaggtaatacctgcctctcacaggtacagctgtttcttggaaatcctgcaacctagcagttttcctaacttgattagcttgagctgacagactgttagtacagatctctggccacagctgatgggg

SEQ ID NO: 908 - DNA, 683 bp, Homo sapiens
  CDS (140)..(397)
ctccagtcccatgccgggaggtctgggtgttggctggtccattccaggacagctacatctttggcagacctggtgctgacagaaccagctctgatcaggaggacctgcaggtttgttacataggccagtacttcctaaaatgggactctcaggacttctgccaatcctggtaccattcatccttttgggggacatccaggaacctgggcacgctgaaggcatccttggcaagccgtgtcccaaaatcaaagtggaatgcgaagtggaagaaatagaccagtgtaccaaacccagagattgcccagaaaacatgaagtgttgcccgttcagccgtggaaagaaatgtttagacttcagaaaggtcagccttactttataccataaggaggagcttgaataacctccaggatttggctcataatccaggcctctctccacgtgtgcctgattgatgctccaaattggcttccacgggccaaaccttggctgttccagaaactgaaccccaggaattgcttacacactttcttccagcgtagcatctcttcaaacacaatgctcttccccttgaccacttctcagtatgaaactctatgtcttcaactttcagaccccccatttatttgtatgaaggcttcagttgccttaataaagtgctctgtggggtcaaaaaaaaaaaaaaa

SEQ ID NO: 909 - DNA, 1148 bp, Homo sapiens
  CDS (124)..(891)
ttaatctgacaagaaggctagaaagctcaatgcgtcttcctattactctgcatatcttatgtcttccatccaaaaagaatcaacttatcagataaataaccacctcatgaactaagatgaatcatgttccggcttttgtcctcctgctgctcttgcctaaggacaacagaagagacacgaaggaatgtgaccatccctatcattggcttgaacaactctggcaaaactgttcttgtggaggcattccaaaaattacttcccagtaagacagaccattgcatgaaatcggaactgactacacttttgttagatgagtatgaactttccatctatgacctgaatggagacctgaagggccgggaagcatggccaaactactatgcacaggcccatgggcttgttttcgtcctggattccagtgacataagacgcatgcaggaagtgaagatcatcttaacacatctgctgtccgataaaagagtggcagggaaacccatcttaattttagcaaacaaacaagacaagaagaaagccctcatgccttgtgatattattgactatctacttctaaagaagctagtgaaagagaataagtgcccatgccgagtagagccatgttcagccatcagaaaccttgaaagaagaaaccatcagcccatagttgaaggactgcgctggctattagctgtcattgatacttgccaactaccacctacctcgagcatctcaatctccaagaataacacaggctctggagaaagatgcttatcacacagcttctccaccagaacaggaatgtcaaaggagaaaagacagcatctagaacaatgctcaatcgaagctaagcctctaaagtcaatcctacagccatcaaatcaatcctatactcactgagaggctcaagaagagtgagatggcatccgttgagaatgaagaccaccttggtaaaaaagaacagagactttacatctttgtaccgagatgctgctgacaaagcttgtggacaataagtcatgggtgatcaaccaaaactgagccttagaaatacagggttcatttagaaataagtatttttttctttaaggttcttaggcagaaaaggattggcaaaaataaatagaacttctttgctgagaaaaaaaaaaaaa

SEQ ID NO: 910 - DNA, 2912 bp, Homo sapiens
  CDS (304)..(1560)
caacttttttttttttctgcctttgaaatttcttcccatcctctgtgactaagtttgaatccgtatttatatttaattattaaatatattgattttttaccattttgtgtatgtctttagttcaccagtaagattataagatgctgaaaggcaggcactgtgttttctcttgctttatatagtgtcttgcacaaaatagcttttgtcatttgtttgctatgtactagatctccctaaatagtgtaaaattgtttcagttttgttttctaggtctaacaaactgtaaatgttaaaaaagcaaagatgggtgaaaaaaaaccagagcctttggacttcgtgaaagattttcaggaatacctgactcagcagacccatcacgtgaacatgatttctggatcagttagtggggacaaagaagcagaggctcttcagggagctggaacagatggtgatcaaaatggacttgatcacccatctgttgaagtttccttggatgaaaactcaggaatgttagtagacgggtttgaaaggacctttgatgggaagcttaagtgtcggtactgcaactatgccagcaaaggaacagcccggcttattgaacacatcagaatccacacaggtgaaaaacctcatcgatgtcatctttgtccatttgcatctgcttatgagcgtcatctggaagcccatatgcgttctcatactggagaaaaaccatacaaatgtgaattatgttccttccgctgcagtgatcgaagtaacttgtcccatcatcgaaggcgcaagcataaaatggtaccaattaaaggtactaggtcttccttaagcagcaagaaaatgtggggggttttacagaagaaaacaagcaatctgggctatagcagaagagcactaatcaacttaagtccaccttccatggtggttcagaaaccagactaccttaacgattttacccacgaaatcccaaatatccagactgactcctatgaaagtatggcaaaaaccacaccaactggtggccttccaagggacccccaagaactcatggttgataaccctttgaatcagctctcgactctagcagggcagttgtccagtctgccacccgaaaaccaaaaccctgcatcccctgatgtagttccctgccctgatgaaaagcctttcatgattcagcagccctctacccaagcagtagtttctgccgtatcagcaagtattcctcagagctcctctcccacaagcccagaacctcggccatcccatagtcaaaggaactatagtccagtggcaggtccaagcagtgagccaagtgcccacacgagcactcccagcataggaaacagccagccaagcaccccagccccagccctgccggtccaggaccctcagcttctgcaccactgccagcactgtgatatgtactttgcagacaacatcctttacactattcatatgggatgtcatgggtatgaaaatccttttcagtgtaatatatgtggatgcaaatgtaaaaacaagtatgattttgcctgtcattttgcaagagggcaacataaccaacattgattgaaaatagtcatattttacttagttttgctgtttttgtggtttggttttttttgttttttgttttggtcatccctaataaagtgtctgctaattcaaggcttatacattatatttatagaatataaatttgtcagtggaataaaatttcccctttttttcataaaaatctggtcagggtcatttatatattagaacagttagacacattggtgtctcttttttcctttcctttcgacattggagaattggagtgcagtcataatcttacaagatgttcatttgaatttctcacatttatggtccataaaaacttcaaggcttatccatacttttgatgtttcaatatgcattgaactggatgttatttctgccatatttcaaaatggtagaataaattacagaatttattactactcatttcagtgtttagtacagaaattgccttaaaaattgctattaattgaaatatcatttagttcacattccttaagttgaatcggtagtttcatttcaactgataatagtaaagctatttcagtttagtaaaaattttcttttttccacaagaggaaatgtaaaacagttaagacttgaaattgaaaattcttttaatatttaaaataacttgtttattcaatgtctaaacacatgtcagttttccactggatttttattttcacaggtaaatacactagagtgctagatgcctttttcccctgtcagtttgactttcatttaaatccttcattctgatatcattactgttaggtgaggtggataactataatgagaatctcttattcttcctattcctttgatgaccaaagagataaagtgaagtcatccttattattaaaatgcagcctccaaacaaatttctcaagattccttttccttccttctatccattttctgcccataatttccaagaaaaggtgggtatggaaacacatgagagaatgtgatagtgaagtcatatttacaaaactgagaacatgtccaaaatggattcttgtctcctcttcagaattagccatttaaaatattttctgtgacttcaaattgtaattcttatttgcagttttaccagtcttcatgtacagtgacgaaactgtgtagaaactaaatcatcgctttagtaagaaaggataaaaaggtgtggaagtgaatataaaatgcatctaaacatgacatttaatttgtttataaaaataagacttactaaatatagagtaattcattttgaataggaggctattgtttttatattgtgtaataactcacgtactctgaagagagcttggtcaaacaataaaatacattgttactaaaaaaaaaaaaaaaag

SEQ ID NO: 911 - DNA, 1557 bp, Homo sapiens
  CDS (232)..(1056)
ggtctcactcgcgatttaaggcataggtgtcgccgagccgggaggctgggagtcgccaggcgtgcgggggagaggcctgggccgcgccgcggcggggggtggaggaagagggcaggcgaggcgggaaggtgggctctggccgccgggagccggggacggagccgccgccgttgcccctagcggggagcagccgggaggagggggcccgcagtcgggagaggggaccccaccatgcccaaagtcttcctggtgaagaggaggagcctgggggtctcggtccgcagctgggatgagctcccggatgagaaaagggcagacacctacatcccagtgggcctaggccgcctgctccacgagccccccgaggactgccgcagcgacggcggcagcagcagcggcagcggcagcagcagcgcgggggagcctggaggagcagagagcagctcgtccccgcacgcccccgagagcgaaacccccgagcccggcgacgccgagggccccgatggacacctggcgaccaagcagcgcccggtcgccagatcgaaaatcaagttcaccacaggcacgtgcagcgactcggtggttcacagctgtgacctgtgtggcaagggcttccgtctgcagcgcatgctgaaccgtcacctcaagtgccacaaccaggtgaaaagacacctgtgcaccttctgcggcaagggcttcaacgacaccttcgacctgaagaggcacgtccgcacacacacaggcattcgtccctacaaatgcaacgtctgcaataaagccttcacccagcgctgctctctggagtcccacctgaagaaaatccatggggtgcagcagcagtatgcctataagcagcggcgggacaagctctacgtctgcgaggattgcggctacacgggccccacccaggaggacctgtacctgcacgtgaacagtgcccatccgggcagctcgtttctcaaaaagacatctaaaaaactggcagcccttctgcagggcaagctgacatccgcacaccaggagaataccagcctgagtgaggaggaggagaggaagtgaggagaaggaaggggaggacagacgttcacactgccacgtatgtctacgtggatttttggttttcagcttcccccaccccactggctcttcttaattagaagtgaccagttcacctctgtgtccttttgaaacatcagcagtagggtccattccaagattgtcagttaccgttagtgacgtcaggccctgtaacctgtgtcctgtctggcgcagttgctcacattcaccaaagtttgttttcatgatcctgatggccaagaacaccgtgtgggattttttttcccccaaggattttcacacacggaaggagaggtatttcttagagagatcatcattttatggtgccttgaaataaaaatacttctacttgaaatgctgtttaagcaaggcaagtgaattttgttattctgaaagagtttacagaaactattttaataaatgaaatgttcttgtgaagcttttaaaagcaaaatggaacattgaaaaaaaaaaaaaaaa

SEQ ID NO: 912 - DNA, 1759 bp, Homo sapiens
  CDS (248)..(1756)
cggtgtgatcggcgagcacccggagctctcacccctccagtgccgacggtagcgaaagactttcctccaggggcttcctcactggggaattgccggaaagagcaaacaaaaaaggcgctggtgtaggctccaaaataaacacatctgaattcatgatggcatcgacagaggctcttattggattaaaagtttcaaaacaaacaataacgctttggaaaaagggttgaatgcaccctcaggcacgaccatggagaaaggtgggaacatacaattggagattcctgacttcagcaactctgtcctgagccatctaaaccagttgcgcatgcagggccgtctctgtgatattgtggtcaatgtgcaaggacaagcttttcgggctcacaaagtggtgctggctgccagctccccctatttccgggatcacatgtccttgaatgagatgagtacagtctccatttcagtcatcaagaaccctactgtttttgaacagctcctttctttctgttacacagggcggatatgcctgcaactggcagatatcatcagctacctaacagctgccagttttctgcaaatgcagcatattatagacaaatgtacacagatcctggagggcattcatttcaaaattaatgtggctgaggttgaagcagaattaagtcaaacaaggacaaagcatcaagagagacctccagagtctcacagggttacaccaaatctcaaccgctcccttagcccacgacataataccccaaagggaaaccggcgaggtcaggttagtgctgtgctggatatcagagagctaagtcctcctgaggagtccaccagccctcagatcattgaaccaagttctgatgtagagagccgggagcccattcttcggatcaaccgagcaggacagtggtatgtggagacaggagtggcggaccgtgggggtcggagtgatgatgaagttagagttcttggagcagtacacatcaaaactgaaaatctggaggagtggcttgggcctgagaatcagccttctggagaagatgggagtagtgcagaggaagtaacagccatggtgattgataccacaggccatggttctgtaggacaggaaaattatactttagggtcttcaggagccaaggtggctcggccaacaagcagtgaagttgacagatttagcccctccggcagtgttgttcccttgacagagagacacagagccagaagtgagtctcctgggagaatggatgagcctaagcaacccagctcccaggtagaagagtcagcaatgatgggagtaagtggctatgtggagtatctccgagagcaggaagtatctgagcggtggttccggtacaaccctcgtctcacctgcatctattgcgccaaatctttcaaccagaagggaagcctggaccgccacatgcgcctacacatggggatcacaccattcgtctgccgcatgtgtggcaagaagtatacccggaaagatcagctggagtatcatatccgcaagcacacaggcaacaagccctttcactgtcatgtctgtggcaaaagtttccccttccaggccatcttgaatcagcactttcgcaaaaaccaccctggctgtatacccctggaggggcctcacagcatctcccctgaaacaactgtcacatctcgaggacaagctgaggaagagtcaccttcacaggaagagacagttgctcctggggaagctgtccagggctctgtgtccaccactgggccagactga

SEQ ID NO: 913 - DNA, 3442 bp, Homo sapiens
  CDS (847)..(2982)
aacagtatttttacgtttatttgcagcaaatgttgttggctttgtatttaaagtatttatgactcactataaagtgtaggatccaagaaaacgcgctagtttcacttggcccccgtggctgtcccggggagctctccaaggaaggactggttcctgaagttcctggggtgctgcaccaccacggaagaaccaagctccacagagaagccagaagccgcgaccgcggggagctctctgccaggcctccaccgcctcagcggccctttacagccaccgcattctccatgcccccagttatttctagcttcgcacagcgcccggcccaccgagcgacctcaaacctcgcgacactcgcaactcccgaggcccttcctgctactggcctcagagggaagagacatcgggaagattgctccgcccacagaaaggaagatttcgttctcgcgagatcccaatgacaattcgggagcccgttctcgcgggattttccaagaccgggttggaatttgcgggggttaggagacggaagtcagagcctaggaagatttgggggtcgccttgccggcctcctgtcctcctccggcggcggcggagcccgagagaactaggtgaacaccgctttgccagcctcacacagcgtcccctggctctgccgccgctccggacgtcgccctcccgttctgcttgggtccccttagtcgctacctttgctgggatccccctcctccatcctgtggcttcgggttgccgaagagcgatgctcggagggcggccggaagtggcgttggccgccattggcctgccggccagccaccttgctgtcctccgccgccttccgggtgttacatgcagccgggctcggcccctccccctggccggatggatccgtcggcgccacagccccgcgcggaaacctcaggcaaagacatatggcatccaggagaaagatgtcttgccccttctccagataatggaaaactttgtgaagcaagcataaaatctatcacagtggatgaaaatggcaagtcatttgcagtcgtcttatatgcagattttcaagaaaggataatacctcttaaacaacttcaagaagtgaaatttggtaaagattgccctatgaatcttatatttgatgatgaagatttagaaaaaccttatttcccaaaccgaaaatttccatcatcctctgttgcttttaaattatctgacaatggagactctattccttataccatcaataggtatttgagagactaccaaagagaaggaacccggtttctttatggacactacatccatggaggagggtgcattctgggtgatgacatgggacttggaaaaacagtacaggttatttcatttctggctgcagttttgcataaaaagggaactcgtgaggatattgaaaataacatgccagagtttttactaagaagtatgaaaaaggaacccctttcttctacagcaaaaaagatgttcttaatagttgctcctctttctgtcctctacaactggaaggatgaattggacacctggggatatttcagagtcactgttttacatggaaacagaaaagataatgaattaattcgtgtaaagcagaggaaatgtgaaattgctctaacaacttatgaaacactacgcttatgcctggatgaacttaacagtttggaatggtcagctgtcattgtggatgaagctcatagaatcaagaatccaaaagctagagtaacagaagttatgaaagctttgaaatgtaatgtccgcattggcctcactggaaccatccttcagaacaacatgaaggaactgtggtgtgttatggactgggctgtgccaggccttttagggagtgggacctacttcaagaagcagttttctgacccagtagaacatggtcagagacacacggcaacaaagagagaactagccactggccgaaaggccatgcaaagacttgccaaaaagatgtctggctggtttctcaggcgcaccaagactcttatcaaggatcagttgcctaagaaggaagaccggatggtgtattgttctttgacagatttccagaaagctgtctatcaaacagtgttagaaacagaggacgtgactttgatacttcaatcttctgagccttgtacctgtaggagtggccaaaaaaggagaaattgttgttataagaccaattctcatggtgaaacagtgaaaaccttgtatctcagttaccttacagtccttcagaaggtagctaaccatgtcgcgctactgcaagctgctagtacttccaaacaacaggaaacacttatcaaaaggatatgtgatcaggtattttccagattcccagattttgtgcagaaaagcaaagatgcagcctttgaaacactttctgaccctaaatacagtggaaaaatgaaggtccttcagcagcttttaaatcattgcaggaaaaacagagataaagttcttctcttttctttttccaccaagttgcttgacgtgctacagcagtactgtatggcgtctgggcttgattaccgacgacttgatggaagtacaaaatcagaggaaagactcaagattgtaaaagagttcaacagtacacaagatgttaacatttgccttgtctctacaatggctggtggactaggcctcaattttgtcggtgccaatgttgttgtattatttgatcctacttggaatccagccaatgatcttcaagccattgacagagcatataggattggacaatgtagagatgtcaaagtgcttaggctgatatccttgggaactgtggaggaaatcatgtatttacgacagatatacaagcagcaacttcactgtgtggtggttggaagtgaaaatgccaaacgatattttgaagcagttcaaggatctaaagagcatcaaggagagctttttgggatccataacctcttcaaatttaggtcccaagggtcttgtcttacgaaggacatcctggaggtgtgaacttcttctctgaccttttcaataatattttaaatacagtttttcttcctcaggaaatctgaaatacaattgctgttgccttttcagagaaacttttggttttctttatcaaaaatgccttggaatttttacttttagagaataagaaatgaattattgtacctctaaactaagattttcccatgcataattacaaataatgcacacacacaaatgtatatgctgggtagtatgaactccaaggcaattttaaataggcagagagaagtttatagttttgaaaacagctgctgaagtcaggaactaaaaaaagaggttttcctaaataaacaaaaatataaaatgtgttttaattaaaagttaccaaatactccctgagatgtactctcatgtctcatggagatttttgttttctgttcccaataaaaattccacaccagtaaaaaaaaaaaaaaaa

SEQ ID NO: 914 - DNA, 1090 bp, Homo sapiens
  CDS (267)..(917)
tttcgtgccgccctcacctggcgctttgtaccctgaggcagctccggactcagggcaggtgggagggattgcactttcctttcactttctcaggacgccaaacccgacacctggggccagaactacacttcccaccaagcagcgaggcaggaggaagaagggggcactggggggctgaaaagcaaacccagaagaaagcgaaaacattacctgctgaccagcagaggtgagagagcgagacagttctgttctaggtggcaagaaccatgcacttctccagctcagccagggcagcagatgagaactttgactatttgttcaagattatcctcattggggattccaatgtggggaagacgtgtgtggtgcagcatttcaagtctggagtctacactgagacacagcagaacacgattggagtggactttaccgtgcgttcccttgatattgacggcaaaaaagtgaagatgcaggtgtgggacacagctggccaggagcgcttccgcaccatcacccaaagctactaccgcagtgcccacgcagccatcatcgcctatgacctcacccggcggtccacgttcgagtccatccctcactggattcatgagatagagaaatatggagctgcaaatgtggtcattatgctgattggaaataaatgtgacctctgggaaaagcggcacgtcctgttcgaggatgcctgcacactggctgagaagtacggcctcctggccgttttggagacatctgccaaggagtcaaagaacatagaagaagtcttcgtgctcatggccaaggagctgatcgcgcgcaacagcctgcacctatatggggagagtgccctgaacggcctccccctggactccagccccgttcttatggcccagggtccaagtgaaaagacccactgcacttgctaagatgtttgcaaagccagttgcacccaccaaagaggccgcctctgaaaccaaaggtagccaggataccgtagtgttgccccagtggcgctttagaccccagcgtggacttgccgctcacccctaatcctcccagtctggatgggccacacttctcccttgacccgggaatt

SEQ ID NO: 915 - DNA, 2562 bp, Homo sapiens
  CDS (136)..(1593)
actccttcatataaaatccggcccctcacagaagcagaaaaatctactaagacccgaaaagaaacccagaagttaagagaatttgaagaaggcctggttagccaatacaagttttatttggaaaatctggaacaaatggttaaagattggaagcagaggaagctgaagaaaagtaatgtagtttccttaaaggcatacaaaggactggcagaagtcgctgtgaagagcttgtgtgagctgttggtggcactacctcattttaactttcacaacaacatcatcgtattgattgtccctctcatgaatgacatgtcaaaattgatatctgaaatgtgttgtgaagctgtgaagaaactctttaagcaagataaattaggccaagcttctcttggtgtaattaaagtgatttctggttttgtgaagggcagaaattacgaagttaggccagagatgttaaaaacatttttatgcctaagaatcaaggaagtagaagtgaaaaaagatacagaagacattaataaaccaaaaaaatttatgactttcaaaaaaaaaaaaaaatctctatcaagaatgcagagaaagtggaagaaagcagaagagaaactagagcgagagcttcgagaggcagaagcttcagagagtactgagaaaaaacttaaactgcacacagagactctgaatattgtgtttgtaacctacttcagaatattgaagaaggcccagaggtcacctctcctgccagcagttctagaaggtcttgccaagtttgctcaccttataaatgtggaattttttgatgatctgttagtagttcttcatactctcattgagtctggtgacctaagctatcaagaaagtcttcactgtgtccagactgcttttcatattctttctggacaaggtgatgttctgaatattgatccattgaaattctacacacatctctacaaaacactgttcaaattacatgcaggtgctaccaatgaaggtgttgagattgtactccagtgccttgatgtcatgctaactaagcgcagaaagcaagtttctcagcagcgagctcttgccttcatcaaacgcctttgtacccttgctcttcatgttcttccaaattcaagtattggcattttagcaactaccagaatattaatgcatactttccccaaaacagatctactgcttgacagtgaatctcagggaagtggagttttccttcctgaactggatgagcctgagtactgcaatgctcagaacactgctctgtgggaactgcatgctctgcggaggcattatcatcccatagtgcagagatttgcagcccacctgatcgctggagcaccttctgaaggctctggagcactcaaaccagagttgagtcgaagatctgctactgaactttttgaggcatatagcatggcagaaatgacattcaatcctcctgttgaatcttcaaaccccaaaataaagggtaaatttttacaaggggattcatttttgaatgaagatttaaatcagctaatcaaaagatactccagtgaagttgctactgaatcgcctctggatttcacgaaatatttgaaaacatcactacactagtagaggaatgaagtcagtggactttcttgtatatttgtgtgtgcagatgtacataaagatgagttgttaacttaggatcttttctttttatacaaggaaagcttcctaagaatgtctaggaagaagaggaagaatgaccctttgcatggcacagggttctgcccctattctgaatatgtcattccatcaaggagatcaaaagcctttttttctccccagtatttggaaattactttcttgatgatgctgccttttaaaagcttcacgtacattatagttttttaaaaaaatctttggactggatcttactgaagtgcagttgctatattaaaattagggcatagagcacagaaaaatcaagaccatgagaagacattttaccatttagctactttttataactaaatactctttaaatatttttatttcaatactgtggatggaaatgagaagcattctaaatttgagttaatatatttttatgaagatatttgagaaaagaaaaaaatagcttgtattcaggttcattggcttttgctggatgatccacctaaagaagttacctaatttggccttttaaaaaaggtgttagtgtttattatagctactttcaaggaaagtttgaatatgattctagtctctaaagttcttcacgttttctgacattccctggagggtgactggggaagaattgctccagggtagaagaaccaggcccaagactttaccattctgatctagagacaaaggatactcaatgaggagcttttttcccctcttggaacaggtaaaatgctttttcttattaatataattataaaacagtattttatgtaacagctattcccatattctaggagtggcctaagaaatgcgtgtttcagtgactagattataaatattctctattgtgaatagttgaataaaacagctgtttttttctgcttcctaaaaaaaaaaaaaaaa

SEQ ID NO: 916 - DNA, 1388 bp, Homo sapiens
  CDS (32)..(760)
gttaatttcaaaactggagaaaaacaaaacaatgaagtctgaagataaagcagaaataatgaaaactttagaggttttgacaaaaaatattaccaagttgaaagatgaggtcaaagctgcttctcctggacgctgtcttccaaaaagtataaaaaccaagactcagatgcagaaggaattacttgacacagaactggatttatataagaagatgcaggctggagaagaagtcactgaacttaggagaaagtatacagaattacagctggaagctcccaaacgagggattctttcatctggtcggggcagaggaattcattcaagaggtcgaggtgcagttcatggccgaggcagggggcgagggcgagggcgaggtgtgcctggtcatgctgtggtggatcaccgtcccagggcattggagatttctgcatttacggagagcgatagagaagatcttcttcctcattttgcgcaatatggtgaaattgaagattgtcagattgatgattcctcacttcatgcagtaattacattcaagacaagagcagaagctgaagcagctgcagttcatggagctcgtttcaaagggcaagatctaaaactggcatggaataaaccagtaactaatatttcagctgttgaaacagaagaagttgagcctgatgaagaagaatttcaggaagagtctttggtggatgactcattacttcaagatgatgatgaagaagaagaggacaatgaatctcgttcttggagaagatgatttgactgatcattgatctgcatatgctagaactctacctgtgtttcattagtattatctaatgtacttttacatatttgtaaaaacaatttttggtaaaatgtgatgaagatggatttcacaaatagacaaaaaagaagaaaactaccttctgatcttgtattttgaaagattgatgtttgcattttacttcagtaaacaattgctaaagacatcacactagaaacatatgcaatgtttttattacatacttctactggacatcacagaattctttgggttctttgtaatttaatgaataggtctgaaaacttatgaccaatacttgttataacttagaggactttgttttattccaaataaggaatgaatttgcatttaaaatcttaatgaatgttttcaaaactgaatagataacatagtactctaactaaagtctccaagttatgtattataatattacatagtagtatgcttaggctttactatgtattagccttttgttggactgtgtatgtattttaccatatgggttttaatgataatggtgtatgactgctttacatgagtccttatgcatccagatgttataataaagtggaatggtctctttaaaaaaaaaaaa

SEQ ID NO: 917 - DNA, 2266 bp, Homo sapiens
  CDS (21)..(1727)
ccgccgtttgcgctgaggcaatggcggcagctgcgccggtggccgcggacgacgatgagcggcggcggcggccgggggctgcactggaggactcccggtcccaggaaggggcaaatggtgaggccgagtcaggtgagctcagccggcttcgggctgagctggcaggcgccctggcagaaatggaaaccatgaaggctgtggcagaggtgagcgagagcacgaaggccgaggctgtggctgcggtgcagcggcagtgccaagaggaggtggcctcgctgcaggccatcctgaaagactccatcagcagctatgaagcccagatcaccgccctgaagcaggagcgacagcagcagcagcaggactgtgaggagaaggagcgggagctgggccgcctgaagcagctgctgtcccgggcctaccccctggactccctggagaagcagatggaaaaggcccacgaggactcggagaagctgcgggagatcgtactgcccatggaaaaggagatcgaggagctgaaggcgaagctgctgagggccgaggagctgattcaggagatccagagacgtccccggcatgccccttccctgcacggctccacggagttgctgcccctgtcccgggatccatcgcccccgctggagcctctggaggagctgagcggagatgggggtccagccgctgaggccttcgctcacaactgcgatgacagcgcctccatctcctccttctcccttggcggtggggtcggcagcagctcctccctgccccaaagccgccagggcctgagccctgaacaggaagagacggcctcgctggtgtctacgggcaccctggttcccgagggcatctacctgccccctcctggctaccagctcgtcccagacactcagtgggagcagctgcagacagagggccgacagctgcagaaggacctggagagcgtcagtcgcgagcgggacgagctccaagagggcctgagacggagcaatgaggactgtgccaagcagatgcaggtgctcctggcccaggtccagaactcagagcagctgctgcggaccctgcaagggaccgtgagccaggcccaggagcgggtgcagctgcagatggcggagctggtcaccacccacaagtgcctgcaccatgaggtaaagcggttgaatgaggaaaaccaagggctccgggccgagcagctgccatcctcagccccccagggctcgcagcaggagcagggcgaggaggaatcactgcccagctctgtgccagagctgcagcagctgctgtgctgcacgcggcaagaggcgagggcccggctgcaggcccaggagcacggggccgagcgcctgcggatcgagatcgtgacgctgcgggaggctctggaggaggagacagtggccagggccagcctggaggggcagctgagggtgcagcgggaggagacagaggtgctggaggcctccctgtgcagcctgaggacagagatggagcgggtgcagcaggaacagagcaaggcccagctcccagacctcctctcagaacagagggccaaggtgctgcggctgcaggcagagctggagaccagtgagcaggtgcagagggatttcgtgcgactgtcccaggccctgcaggtgcgcctagagcggatccgccaggctgagaccctggagcaagtgcgcagcatcatggatgaggcgccactcacggacgtcagggacatcaaggacacctgaggggtcaggatatccccacccccaccctgggaaagacgcctttccccactcctgaaccatgaggcctcgctctggggtcttggatggcttttccaccgtccctgagactggggttgaggggactgacgggggccaccaccgccccgccctccagcgcctcctcccagggtggctgggcctcctgttctcagggatcacacctgggtgaggggcccaagcccctcccggaaccaaaggtgcaggctcaggcctgcggctttctggctgctgtgctgcctcctgggctccagccctcccctgcccccagcccgtcccctgcccagggcacagcggagccatgggggctgggagtccccatcagaggcagtgaggtgggccccggccctgggacaggcagctgccttctggtctgcatgacactaagacgcttgtccacagcggcgacccaggcctccaagcttgcacagaggcaaggccagacttttccgtcgtttattttcaataaataagcagctcagcgcaaaaaaaaaaaaaaa

SEQ ID NO: 918 - DNA, 1307 bp, Homo sapiens
  CDS (1)..(279)
atggcggcgccgaaggggagcctctgggtgaggacccaactggggctcccgccgctgctgctgctgaccatggccttggccggaggttcggggaccgcttcggctgaagcatttgactcggtcttgggtgatacggcgtcttgccaccgggcctgtcagttgacctaccccttgcacacctaccctaaggtagggcccgtccggagcgggctgcgacccttcccttgcagcccatttctcggctccccacacgtatgtcggctctggcaacctggctgttaaatcggcccttcaatcgctgtctcccatctgtgtagctcctgttttcctccctaatcctgcctgcaccccatttctgctgtcattaccggaagtttgtcctgcactaccctgtgataggctgggggacacaaagatgagaaagacgcgatccctttcctctgggagcttgccgggctgcaggggagtcgagcactcggaggaggataggggaggatatggatgattaatgcggggtcctcacctaagggagcgtaaggggggattgtagaaagggaggcgcagatacgcgagtccacaaatgattgattgataacccttgtttactaagcgcctctcggggccaggagcgcagtcttcggggagtcagacaagtagacgattccactgtggtataaaaagcgtcacgaaggcagctcagggagtagcgagacgctcaggaatgctgtctgcctatgttgagttactgtgtccaagacgctgccaagagggactgggttagagaagaggcaattaggtgtctgcctaccagaaactgaccactcagtgcagaaaacggggaattcgtggagtgggtgaagaaatgagactgtggacaggagggggttcgcagcttacagagaggaatggccctcctctctatgcttcccccctttcttttaattacatacctaaccctcttcacgttggtttttcagcctaagaactctgtttactcaacattctaaattgcttgatgattcccaccacacctttcccatgtatgatttgagtatatgccctcccccacgttgttttatgagagcttttgttgatgttgctggtggtttcctcttcgtttttccttcatctcctctatgctatttgcttaaccattgtggctggacctccttgctctctaaaactggagtggttacggagacagttccagtgaagcttaggatgttccatactggccagtattttcaggtctttgaaatgaaaagatataaaagccggcacttctcagattttgttacggcacgaaa

SEQ ID NO: 919 - DNA, 3940 bp, Homo sapiens
  CDS (28)..(3336)
gaatctccttccacaggtcattattggatgcatcaaccagtatctttctataaactcaaacttaccaacaatacactggaccaagaagggcatatcatcttgcactctatgcatcgttacctgccgaggcttcatttggtgcctgcagaaaaggctgtggaggtgatacaattaaatggccctggtgtccacacttttaccttcccacagactgaattctttgcagtaacagcttatcagaacattcagattactcagctgaaaatagattacaatccatttgccaaaggctttcgggatgatgggctgaataataagccccagagagatggaaaacaaaagaacagctctgaccaagaagggaataatatttccagttcttctggtcatcgggtccgtcttacagaaggtcaggggtcagagatacaaccaggtgatttggatcctttgtcaaggggtcatgaaacatcaggcaagggtttggagaagacttcccttaatataaaacgagactttcttggtttcatggatactgattcagcacttagtgaagttcctcaattgaagcaagagatttctgaatgtcttattgccagcagttttgaagatgactcccgtgtagcctcaccgttagaccagaacggaagcttcaatgttgttattaaagaggaacctctagatgattatgactacgaacttggtgagtgcccagaaggggtcactgtgaaacaggaagagacagatgaagagacggatgtatactcaaacagtgatgatgatcctatactagagaaacagctaaagaggcacaataaagttgacaacccagaagctgaccatctatcttctaaatggcttccaagcagcccatcaggtgttgctaaagctaaaatgttcaaattagacactggaaagatgccagtagtctatctggagccctgtgctgtcaccagaagcacagttaagatttctgaactccccgataacatgctttccacatctcgaaaggataaatcttctatgttggcagaattggaatatttgcctacatacattgaaaattccaatgagactgccttctgcttaggcaaggaatcagaaaatggtcttagaaaacattcaccagatctcagagtggtacaaaaatatcccttactgaaagagcctcagtggaaatatcctgatatatctgacagcattagcacagaaagaatactcgacgattcaaaggattcagttggagactcactttcaggaaaagaggacttgggcagaaagagaacaactatgcttaagattgcaacagccgcaaaggtagtgaatgctaatcagaatgcctctccaaatgtccctggaaaaagaggaaggccacgaaaattgaaactctgtaaggcaggacgaccacctaagaacacaggaaagtctttaatttctacaaagaatacacctgtaagccctgggagtacctttccagatgtgaagcctgatctggaagatgtggatggtgttctctttgtttcctttgaatcaaaggaagctctagacattcatgcagttgatgggacaacagaagaatcttctagtctccaggcatcaaccacaaatgactcaggttacagagcaagaatttcccagttggaaaaggaattgatagaagatttgaagactttgcggcacaagcaggtgatacatcctggtcttcaagaagtgggcttaaaattgaattcagtggatccaacaatgagcattgatcttaaatacttgggagtacagttacctttggctccagctactagctttcctttttggaaccttacaggaaccaaccctgcctctcctgatgcgggatttccctttgtttctaggacagggaaaaccaatgatttcactaagatcaagggatggaggggaaaatttcatagtgcttctgcatctaggaatgaaggtggaaattcagaaagttcactgaaaaatcgttctgctttctgtagtgataagctagatgaatacttggaaaatgaaggcaagctgatggaaacaagcatgggtttttcttctaatgctcccacatctcctgtggtgtaccagcttcccactaagagtaccagttatgtacgaacacttgatagtgtactaaagaagcaatctactatttccccttctacctcttattctttgaaacctcattctgtaccccctgtctctcgaaaggcaaagtctcaaaacagacaggcaactttcagtggccgaactaaatcatcttataaatccattttaccataccctgtttcaccaaagcagaaatactctcatgtgattctaggagataaggttaccaagaattcttcaggcatcatctcagaaaatcaggcgaataactttgttgtgccaactttggatgaaaatatatttccaaagcagattagtttgcggcaggcacagcagcagcagcaacagcaacagggaagtcgccctccaggcttgtctaaatctcaggtgaagctaatggacctggaagactgtgcactttgggaaggaaaaccaaggacatacatcacagaagagcgagcagatgtatccttaacaactctacttacagctcaagcatccctcaaaactaaacctatccacacaatcataaggaaacgagcccctccctgcaacaatgacttctgtcgactgggttgtgtatgttccagtctagctttggagaagcgccaacctgctcactgccgccgaccagactgcatgtttggttgtacttgtttgaaaagaaaagttgtacttgttaaaggaggatccaaaactaagcattttcagaggaaggctgctcatcgagatccagtattttatgatactctgggagaggaggcaagggaggaggaagaaggaatcagggaggaggaggaacaattgaaagagaaaaagaagagaaagaagctagaatacactatatgtgagacagagcctgaacagcctgttcgacattacccattatgggtaaaagtagaaggtgaagtagatccagaaccagtttatatccccacgccttctgtcattgagcctatgaaaccattgttattgcctcagccagaagttttatctcctactgtgaagggcaaactgctcactggaattaaatctccacggtcatatactcccaaacccaatcctgtgattcgggaagaggacaaagatccagtctacttgtactttgaaagtatgatgacttgtgctcgagttcgagtatatgagcgaaaaaaagaggaccagagacaaccatcttcctcctcctccccatctccatccatttcagcagcaaacttcatgtcattctagccctgcagcaacccatcaatcaatgccaaaggaacctgatttctgcaacagccagccttaaaacaactccaccgtgttgcacttggcaggcatgcattctgcatcaacattcacaagcaaacgcagctggcaagtcttcctgcccatgacaggcagcaatccctctttctcactctctttcatcatgccatcagcaggtccaaccctggttgggtccccacccacaacctgcattggcagcatccatctccagcaacttggccaaacttgtgcgcaggcacgactcgcgcaacacaggattttggagccatcattattccgcagacaccattccattaggccacacatgtcgacacatacacttaaggtggcgcagccttccactcatatgcagtcaggcttctccagcgacaagcagccgggcgtgagatagaaaccctcactggtatattcactccttcgctgttgacacattctcttattggcccatcaatcgttccagcaccacgacaatgacactcggcctgagcacaatcctggactttacgcagacgaccccggacacgttccccatggacccctcttggccacaaatctgcgg

SEQ ID NO: 920 - DNA, 1944 bp, Homo sapiens
  CDS (128)..(901)
ctctagagcggccgcttgggcgcacttgccgggtcaccttgtcccggaggagaaatggcttccctgaggcaagtgtaacctacattcccagcccaccagcctgacgcccagccagggagagagtaccatggatggcatcattgaacagaagagcatgctggtgcacagtaaaatcagtgatgctggcaagaggaatggtttaattaacaccagaaacttgatggccgagagcagagatggtctggtgtctgtttacccagcgccccagtaccagagccaccgggtgggggccagcacagtgccggccagcctggacagcagcaggagtgagccgatgcagcagctgctggaccccaacaccctgcagcagtcagtggagtcccgctaccggcccaacatcatcctctattcagagggcgtgctgcgctcctggggggacggtgtggccgccgactgctgcgagaccaccttcatcgaggaccggtcgcccaccaaagacagcctcgagtacccggatgggaagttcattgacctctcagctgatgacataaaaatccacaccctgtcctacgatgtggaggaggaggaggagttccaggagctggagagcgactactcaagcgacacagagagtgaggacaatttcctcatgatgcccccgcgggaccacctgggcctcagtgtcttctccatgctctgctgcttctggcctctgggcatcgcagccttctacttgtcccatgagaccaacaaagccgtggccaagggggacttgcaccaggccagcaccagctcccggcgggccctattcctggcagtgctgtccatcaccattgggactggcgtctatgtgggcgtggccgtggccctcatcgcctacctctccaagaacaaccacctgtgagcttcctgcgaatggagggggagcacccggggccaggtctgtgtggacgtggaggaagcaggcataccgcatgatgctgtacagtacaaatgattgccaaatgatgccacgaagccctgggatttcctacccatggatttattttgtttttatcctttaatttcatgttcacagcactgtgtagagcaccagacagacgggcactgctaatccttccaaaggaaagctccaaagatcccagcccgcaaggctgtctctggatggattctggtggatgaatggcaacgcggctctctgcagcctgccagtgcccagagtgccaccgcattagcaatatacaaacagtccaaaaaagtgtttattttttatggaatacggtgcaataggcagaggacaagggacacatcactcttctgtctgtggccctgctggagtcctttgtgccccccggagtccacacgccttccctgcaagacgagaatggggctgggaagaaagaggcaacaccacggctggcaggagccccgctgcactgctctgcagacccattggcctgaccctgagaagcagagccagcaaagcccgggacctgcccctctttctttcccttcacaccaccccagcctcaggatgtcaagccacctccggaacgtgtctacactccacagctaccccgcagcaatacgcactcttgggacctcgctgatctaggatggggaggcaggccaccgcccctcccaagactcctcaagaaagagccccgcggttgctccggaaactcgaggcactgcagctatgggcactgcctcagcctaaagacacaggggcgcctcccaatcaccgcgctggcggatgctcaccccgtcataagcagaaactagtgatcctggaaatgagatgggccttactctgtcgactaaatgaatagctattttcttgtcattttttaaagtgcaactcttgcttcatgctgcttaagttaccagatgaatgctgagaaataagtaatcacagacattttaataccaaaaaaaaaaaaa

SEQ ID NO: 921 - DNA, 796 bp, Homo sapiens
  CDS (433)..(705)
  misc_feature (1)...(796): n = a,t,c or g
gacaggcttgccatctttcanaccctggggaagacattgcaactgactggggaggacacagctcatgcacagcttctcgtgcgggccagcccgctgcgaaccctccacccagctaccggagggaggagggaggatgcgctgtggggttgtttttgccataagcgaactttgtgcctgtcctagaagtgaaaattgttcagtccaagaaactgatgttatttgatttatttaaaggctaaaatttttttttttattctttgcacaattgtttcattgtttgacacttaatgcactcgtcatttgcatacgacagtagcattctgaccacacttgtacgctgtaacctcatctacttctgatgtttttaaaaaatgacttttaacaaggagagggaaaagaaacccactaaattttgctttgtttccttgaagaatgtggcaacactgttttgtgattttatttgtgcaggtcatgcacacagttttgataaagggcagtaacaagtattggggcctatttttttttttttccacaaggcattctctaaagctatgtgaaattttctctgcacctctgtacagagaatacacctgcccctgtatatccttttttcccctcccctccctcccagtggtacttctactaaattgttgtcttgttttttattttttaaataaactgacaaatgacaaaatggtgagcttatgatgtttacataaaagttctataagctgtgtatacagttttttatgtaaaatattaaaagactatgatgatgacatttaaaaaaaaaaaa

SEQ ID NO: 922 - DNA, 1568 bp, Homo sapiens
  CDS (1)..(1149)
atggtgctggcgcgggtggcgcgccggccggcggggtctgcggaggcccaggcgtccctggcggggaaggcggcgcttccggagcgtgccaggaagatgtcgagcccgggcatcgacggcgaccccaagcctccatgcttgcctcgaaacggtctggtgaagctgccgggccagcccaacggcctgggtgcggccagcatcaccaagggcacgccagccaccaagaaccgcccctgccagccaccacccccacccaccctcccaccacccagcctggctgctccactgtcccgggctgccctggctgggggcccgtgcaccccggcaggtggaccagcctcagccttggcacctgggcacccagcggagcggccgccgctggccacggacgagaagatcctcaatgggctcttctggtatttctcggcctgcgagaagtgtgtgctggcccaggtgtgcaaggcctggcggcgcgtgctgtaccagcccaagttctgggcaggcctcacgccggtgctgcatgccaaggagctctacaacgtgctgcctggtggcgagaaggagttcgtgaacctgcagggttttgccgccagaggcttcgagggcttctgcctggttggcgtctccgacctggacatctgtgagttcattgacaactatgcgctctccaagaagggtgtcaaagccatgagcctcaagcgctccaccatcacggacgcaggcctcgaggttatgcttgaacagatgcagggcgtggtgcgtctggagctgtcgggctgcaacgacttcaccgaggccgggctgtggtccagcctgagcgcgcgcatcacctcgctgagcgtgagtgactgcatcaacgtggccgacgacgccatcgcggccatctcgcagctgctgcccaacctggcggagctgagcctgcaggcctaccacgtgacggacacggcgctggcctacttcacggcgcgccagggccacagcacgcacacgctgcgcctgctctcctgctgggagatcaccaaccacggcgtggtcaacgtggtgcacagcctgcccaacctcaccgcagctcagcctctcgggctgctccaaggtcaccgacgacggcgtggagctcgtggccgagaacctgcgcaagctgcgcagccttgacctctcgtggtgcccacgcatcaccgacatggcgctggagtacgtggcctgcgacctgcaccgcctagaggagctcgtgctcgacaggtgtgtacgcatcacggacactggcctcagctatctgtccaccatgtcgtccctccgcagcctctacctgcgatggtgctgccaggtgcaagacttcgggctgaagcacctcctggccctggggagtttgcgcctcctgtctctggcaggctgcccgctgctcaccaccaccgggctgtcgggcctggtgcagctgcaggagctggaggagctggagctgaccaactgccccggggccacccccgagctcttcaagtatttctcgcagcacctgccccgctgcctcgtcattgagtagcgcgaggcccccgccccggtcgcgctcgtgc

SEQ ID NO: 923 - DNA, 2088 bp, Homo sapiens
  CDS (227)..(1675)
ggcaggaagcccacggcccacaggggtgtaacccgttacctacctggagcccccagcccttgccatctgccgcctcctcagcatccggcaccccgaggagctgtccctgctccgggctcctgagaagaaggagaagaagaagaaagagaaggagccagaggaagagctctatgacttgagcaaggttgtcttggctgggggcgtggcacctgcactgttccgggggatgccagctcacttctcggacagcgcccagactgaggcctgctaccacatgctgagccggccccagccgccacccgaccccctcctgctccagcgtctgccacggcccagctccctgtcagacaagacccagctccacagcaggtggctggactcgtcgcggtgtctcatgcagcagggcatcaaggctggggacgcactctggctgcgcttcaagtactacagcttcttcgatttggatcccaagacagaccccgtgcggctgacacagctgtatgagcaggcccggtgggacctgctgctggaggagattgactgcaccgaggaggagatgatggtgtttgccgccctgcagtaccacatcaacaagctgtcccagagcggggaggtgggggagccggctggcacagacccagggctggacgacctggatgtggccctgagcaacctggaggtgaagctggaggggtcggcgcccacagatgtgctggacagcctcaccaccatcccagagctcaaggaccatctccgaatctttcggccccggaagctgaccctgaagggctaccgccaacactgggtggtgttcaaggagaccacactgtcctactacaagagccaggacgaggcccctggggaccccattcagcagctcaacctcaagggctgtgaggtggttcccgatgttaacgtctccggccagaagttctgcattaaactcctagtgccctcccctgagggcatgagtgagatctacctgcggtgccaggatgagcagcagtatgcccgctggatggctggctgccgcctggcctccaaaggccgcaccatggccgacagcagctacaccagcgaggtgcaggccatcctggccttcctcagcctgcagcgcacgggcagtgggggcccgggcaaccacccccacggccctgatgcctctgccgagggcctcaacccctacggcctcgttgccccccgtttccagcgaaagttcaaggccaagcagctcaccccacggatcctggaagcccaccagaatgtggcccagttgtcgctggcagaggcccagctgcgcttcatccaggcctggcagtccctgcccgacttcggcatctcctatgtcatggtcaggttcaagggcagcaggaaagacgagatcctgggcatcgccaacaaccgactgatccgcatcgacttggccgtgggcgacgtggtcaagacctggcgtttcagcaacatgcgccagtggaatgtcaactgggacatccggcaggtggccatcgagtttgatgaacacatcaatgtggccttcagctgcgtgtctgccagctgccgaattgtacacgagtatatcgggggctacattttcctgtcgacgcgggagcgggcccgtggggaggagctggatgaagacctcttcctgcagctcaccgggggccatgaggccttctgagggctgtctgattgcccctgccctgctcaccaccctgtcacagccactcccaagcccacacccacaggggctcactgccccacacccgctccaggcaggcacccagctgggcatttcacctgctgtcactgactttgtgcaggccaaggacctggcagggccagacgctgtaccatcacccaggccagggatgggggtgggggtccctgagctcatgtggtgccccctttccttgtctgagtggctgaggctgatacccctgacctatctgcagtcccccagcacacaaggaagaccagatgtagctacaggatgatgaaacatggtttcaaacgagttctttcttgttactttttaaaatttcttttttataaattaatattttattgttggatcctcaagaaaaaaaa

SEQ ID NO: 924 - DNA, 2301 bp, Homo sapiens
  CDS (250)..(1437)
cgcggccgcgtcggacctgtggtcccgggtttctgcagagtctacttcagaagcggaggcactgggagtccggtttgggattgccaggctgtggttgtgagtctgagcttgtgagcggctgtggcgccccaactcttcgccagcatatcatcccggcaggcgataaactacattcagttgagtctgcaagactgggaggaactggggtgataagaaatctattcactgtcaaggtttattgaagtcaaaatgtccaaaaaaatcagtggcggttctgtggtagagatgcaaggagatgaaatgacacgaatcatttgggaattgattaaagagaaactcatttttccctacgtggaattggatctacatagctatgatttaggcatagagaatcgtgatgccaccaacgaccaagtcaccaaggatgctgcagaagctataaagaagcataatgttggcgtcaaatgtgccactatcactcctgatgagaagagggttgaggagttcaagttgaaacaaatgtggaaatcaccaaatggcaccatacgaaatattctgggtggcacggtcttcagagaagccattatctgcaaaaatatcccccggcttgtgagtggatgggtaaaacctatcatcataggtcgtcatgcttatggggatcaatacagagcaactgattttgttgttcctgggcctggaaaagtagagataacctacacaccaagtgacggaacccaaaaggtgacatacctggtacataactttgaagaaggtggtggtgttgccatggggatgtataatcaagataagtcaattgaagattttgcacacagttccttccaaatggctctgtctaagggttggcctttgtatctgagcaccaaaaacactattctgaagaaatatgatgggcgttttaaagacatctttcaggagatatatgacaagcagtacaagtcccagtttgaagctcaaaagatctggtatgagcataggctcatcgacgacatggtggcccaagctatgaaatcagagggaggcttcatctgggcctgtatcggcatgatgaccagcgtgctggtttgtccagatggcaagacagtagaagcagaggctgcccacgggactgtaacccgtcactaccgcatgtaccagaaaggacaggagacgtccaccaatcccattgcttccatttttgcctggaccagagggttagcccacagagcaaagcttgataacaataaagagcttgccttctttgcaaatgctttggaagaagtctctattgagacaattgaggctggcttcatgaccaaggacttggctgcttgcattaaaggtttacccaatgtgcaacgttctgactacttgaatacatttgagttcatggataaacttggagaaaacttgaagatcaaactagctcaggccaaactttaagttcatacctgagctaagaaggataattgtcttttggtaactaggtctacaggtttacatttttctgtgttacactcaaggataaaggcaaaatcaattttgtaatttgtttagaagccagagtttatcttttctataagtttacagcctttttcttatatatacagttattgccacctttgtgaacatggcaagggacttttttacaatttttattttattttctagtaccagcctaggaattcggttagtactcatttgtattcactgtcactttttctcatgttctaattataaatgaccaaaatcaagattgctcaaaagggtaaatgatagccacagtattgctccctaaaatatgcataaagtagaaattcactgccttcccctcctgtccatgaccttgggcacagggaagttctggtgtcatagatatcccgttttgtgaggtagagctgtgcattaaacttgcacatgactggaacgaagtatgagtgcaactcaaatgtgttgaagatactgcagtcatttttgtaaagaccttgctgaatgtttccaatagactaaatactgtttaggccgcaggagagtttggaatccggaataaatactacctggaggtttgtcctctccatttttctctttctcctcctggcctggcctgaatattatactactctaaatagcatatttcatccaagtgcaataatgtaagctgaatcttttttggacttctgctggcctgttttatttcttttatataaatgtgatttctcagaaattgatattaaacactatcttatcttctcctgaactgttgattttaattaaaattaagtgctaattaccaaaaaaaaaaaa

SEQ ID NO: 925 - DNA, 2081 bp, Homo sapiens
  CDS (104)..(1918)
agtggtaacaacgcagagtacgcggggggctcggaggggaggctagggggccgtgccaggcccgaagccgaggcggggccgggatgcggcgctgaggcccagcatggccggcccgggccccaccttcccgctgcaccggctcgtctgggcgaaccggcatcgcgaactggaggccgcactgcacagccaccagcacgacattgaacaggaggacccccgcgggcggaccccactggagctggccgtgtctctgggaaacctggagtctgtgagagtgctccttcgacacaatgccaacgtgggcaaagagaaccgccagggctgggcagtcctgcaggaggcagtcagcactggagaccccgagatggtgcagctggtgctccagtatcgggactaccagagggccacgcagaggctggcgggcattccggaactgctcaacaaacttcgccaggcccccgatttctacgttgagatgaagtgggagttcaccagctgggtgccccttgtgtctaagatgtgcccaagcgatgtgtaccgcgtgtggaagcggggtgagagcctgcgagtagacaccagtctcctgggcttcgagcacatgacctggcagcggggccggaggagcttcatcttcaagggccaggaggcaggagccctggtgatggaagtggaccatgaccggcaggtggtgcatgtggagacactggggctcactctgcaggagcccgaaacactgctggccgccatgcggcccagcgaggagcatgtggccagtcgcctcacctctcctatcgtctccacccacctggacactcgtaatgtggcctttgagaggaacaaatgtggtatctggggctggcggtctgagaagatggaaactgttagcggctacgaggccaaggtgtacagtgccaccaacgtggagctggtgacacgcacacgcacggagcacctctctgatcaggacaagtcgaggagcaaagcggggaagactccattccagtccttcctggggatggcgcagcagcattcctcccacaccggggcccccgtgcagcaggcagccagccccaccaaccccacagccatctcccctgaggagtacttcgaccccaacttcagcctggagtcacggaacattggccgccccatcgagatgtccagcaaagtacagaggttcaaggcaacactgtggctgagtgaagagcacccgctctccctgggtgaccaggtgacccccatcatcgacctaatggccatcagcaacgctcactttgccaagctgcgcgacttcatcactctgcgccttccacctggcttccccgtcaaaattgagattccccttttccacgtgctcaatgcccgcatcaccttcagcaacctgtgtggctgtgatgagcccctgagctccgtgtgggtgccggcccccagctctgctgtcgccgcatcagggaaccctttcccgtgcgaggtggaccccaccgtgtttgaagtgcccaacgggtacagcgtgctgggcatggagcgcaacgagcccctccgggacgaggacgatgacctcctgcagttcgccatccagcagagcctgcttgaagcgggcactgaggcggagcaggtgaccgtctgggaagccctgaccaacacccggcccggtgcccgccctcctccccaggccacggtttatgaggaacagcttcagctggagcgggccctccaggaaagcctgcagctgtccacagagcccaggggcccaggatcccctcccaggacacccccagccccctgtccacccagctttgaagagcacgtgcgcctggccctggagttgtcttcacgggagcaggaggaacgggaacggcgcgggcagcaggaggaggaggacttacagcggatcctgcagctgtcactcactgagcactgagccatagccccgggagggctggccaggccactccctgcccgcttttgtaatttatttatttataaactctctgctgctgagcttggggcctggagccccaggaatgagcaggcaggggagactgagatggaaataaagagactgtcgcaaaaaaaaaaaa

SEQ ID NO: 926 - DNA, 2165 bp, Homo sapiens
  CDS (104)..(2002)
agtggtaacaacgcagagtacgcggggggctcggaggggaggctagggggccgtgccaggcccgaagccgaggcggggccgggatgcggcgctgaggcccagcatggccggcccgggccccaccttcccgctgcaccggctcgtctgggcgaaccggcatcgcgaactggaggccgcactgcacagccaccaacgaatcccaaccctgctcgccctggcagcctccctgccttgccctcttctctcctgccctttgagagtgtcccgtctcccccagcacgacattgaacaggaggacccccgcgggcggaccccactggagctggccgtgtctctgggaaacctggagtctgtgagagtgctccttcgacacaatgccaacgtgggcaaagagaaccgccagggctgggcagtcctgcaggaggcagtcagcactggagaccccgagatggtgcagctggtgctccagtatcgggactaccagagggccacgcagaggctggcgggcattccggaactgctcaacaaacttcgccaggcccccgatttctacgttgagatgaagtgggagttcaccagctgggtgccccttgtgtctaagatgtgcccaagcgatgtgtaccgcgtgtggaagcggggtgagagcctgcgagtagacaccagtctcctgggcttcgagcacatgacctggcagcggggccggaggagcttcatcttcaagggccaggaggcaggagccctggtgatggaagtggaccatgaccggcaggtggtgcatgtggagacactggggctcactctgcaggagcccgaaacactgctggccgccatgcggcccagcgaggagcatgtggccagtcgcctcacctctcctatcgtctccacccacctggacactcgtaatgtggcctttgagaggaacaaatgtggtatctggggctggcggtctgagaagatggaaactgttagcggctacgaggccaaggtgtacagtgccaccaacgtggagctggtgacacgcacacgcacggagcacctctctgatcaggacaagtcgaggagcaaagcggggaagactccattccagtccttcctggggatggcgcagcagcattcctcccacaccggggcccccgtgcagcaggcagccagccccaccaaccccacagccatctcccctgaggagtacttcgaccccaacttcagcctggagtcacggaacattggccgccccatcgagatgtccagcaaagtacagaggttcaaggcaacactgtggctgagtgaagagcacccgctctccctgggtgaccaggtgacccccatcatcgacctaatggccatcagcaacgctcactttgccaagctgcgcgacttcatcactctgcgccttccacctggcttccccgtcaaaattgagattccccttttccacgtgctcaatgcccgcatcaccttcagcaacctgtgtggctgtgatgagcccctgagctccgtgtgggtgccggcccccagctctgctgtcgccgcatcagggaaccctttcccgtgcgaggtggaccccaccgtgtttgaagtgcccaacgggtacagcgtgctgggcatggagcgcaacgagcccctccgggacgaggacgatgacctcctgcagttcgccatccagcagagcctgcttgaagcgggcactgaggcggagcaggtgaccgtctgggaagccctgaccaacacccggcccggtgcccgccctcctccccaggccacggtttatgaggaacagcttcagctggagcgggccctccaggaaagcctgcagctgtccacagagcccaggggcccaggatcccctcccaggacacccccagccccctgtccacccagctttgaagagcacgtgcgcctggccctggagttgtcttcacgggagcaggaggaacgggaacggcgcgggcagcaggaggaggaggacttacagcggatcctgcagctgtcactcactgagcactgagccatagccccgggagggctggccaggccactccctgcccgcttttgtaatttatttatttataaactctctgctgctgagcttggggcctggagccccaggaatgagcaggcaggggagactgagatggaaataaagagactgtcgcaaaaaaaaaaaa

SEQ ID NO: 927 - DNA, 1584 bp, Homo sapiens
  CDS (258)..(602)
aaacagcgtggtcagggaaggcttctccgctaaaggaagtagctacaggaaggcaggatgtgccgggcaggggagacagcaaaggcaacagcctgagaggggaccctgcctgggggtcagtgtggctgagtggcctgagtgaggagcagaaaggggaggcgaggtggaaatgtggggggccagggcctgggcctggctggtggccctgatggcccaggggcctctgtctccccccaacagccctgctcctggacatcatgacggtggccggcgtgcagaagctcatcaagcggcgcggcccgtacgagatgagccccagcctcctggactacctcaccatggacatctacgccttcccggccgggcacgccagccgcgccgccatggtgtccaagttcttcctcagccacctggtgctggcggtgcccctgcgcgtgctgctggtgctctgggccctctgcgtgggcctgtcccgcgtgatgatcggccgccaccacgtcacggacgtcctctccggctttgtcatcggctacctccagttccgtctggtggagctggtctggatgccctccagcacctgccagatgctcatctctgcctggtgaagcgcccgccggcccacacaagcctctgggggcagggctggccctagagaaggggcagggggtggcgaggtggcgggcgtgggtggaacagagcggccaggagtcagagcggccacccccacctcatcttcccctcctggctggaggctggcgaacccaggccacccctcccggagacaagcgtgtttggcagtgccaggcctcttgcccctttgcttggactccaagtctcctctctgggcagccaggacccacccatggggacagccctatttagcttctgctctgggaacagcaaaaatcaggatggtgggaggggccgagtcttgtcttgtcctttcatcatcatgactgttgagttcttggctgtgcccatcacgccacagcacgacgcctgccaaaatgcccccaacctactgcctgatgcaggtgccattgccattagcggtcatcgacagcttagggcagcactttccaacgggtgcccatgggacaccagcctgcgagatgcttttgtgggaaaggggttttgtggttcaataactttcggaagtgctgcacactctgtccccaagttggacattcacaaaggccgttattgccgtaaaggctctgacaagccctatagaaaagcttcttgctaaaccttctttaacccatgttttctaaacttatttgaccacagaacccttttcttggggaacagctattaacccccaaggaattattggttcctcaagtgcgttttgggagctgctgccagagagctaaagggcctggggtgtgagctgactctccgctggggaggccgggtgcacacgccacagcccgaggaaagtgctggccaccgcccgtgggcatcgatgaggctttggcccccaggggccggactccgtgtgacctaataggtcgtttccaagtcacccgttttggatgtgcatttcatgtgacaatacagatgacatgcaaaaaaaaaaaa

SEQ ID NO: 928 - DNA, 1815 bp, Homo sapiens
  CDS (2)..(1066)
gatgggaaaaagacgttgtgttcctccactcgagcccaagttggcagcaggctgttgtggggtcaagaagcccaaattatctggaagtggaacgcacagtcacgggaatcagtccacaactgtccccggctctagttcaggacctcttcaaaaccaccagcatgtggacagcagcagtggacgggagaatgtgtcagacttaactctgggacctggaaactctcccatcacacgaatgaatcccgcatcgggagcgctgagccctcttccccggcctaatggaactgccaacaccactaagaatctggtggtgactgcagagatgtgctgctactgcttcgacgtactctactgtcacctctatggcttcccacagccacgacttcctagattcaccaatgacccctatccgctctttgtgacgtggaagacagggcgggacaagcggcttcgtggctgcattgggaccttctcagccatgaatcttcattcaggactcagggaatacacgttaaccagtgcacttaaggacagccgatttccccccctgacccgagaggagctgcctaaacttttctgctctgtctccctccttactaactttgaggatgccagtgattacctggactgggaggtaggggtccatgggattcgaattgaattcattaatgaaaaaggtgtcaaacgcacagccacatatttacctgaggttgctaaggaacaagataattatactggggtaacatctgacaggaaggacgcaggagcagggagcctggggacagccattatggcatgtgtcgggctatcatctcatgtctcagagtctccacgggactggcagacagactgggcgccagactgggatcagatccagacaatagactccttgctcaggaaaggtggctttaaagctccaattaccagtgaattcagaaaaacgatcaaactcaccaggtaccgaagtgagaaggtgacaatcagttacgcagagtatattgcttcccgacagcactgtttccagaacggcactcttcatgccccgcccctctacaatcattactcctgacacacggctgcatgaccagtcccacccccccgtggccaccaatggctatgacatcattggagcagatgcctcctcttcctggtccagttacttctattactgcaccattttatgatgctagcttccgttgccaagtctgcctcccgctgactgagggagggtagggttaccttgaacgaaacagaacttgaggggcccaagccttatctcagcctttcctcaatatggggttccgttggattggggctcctccatgactagtgggaattactgtgggttcagaagacccttgtctggtatttgccacatggggtattggccacacgctggaagctgaaattgatgatccctgaaggttgaacccacacacacccctgcagcctccccagatgaagtaggtgtattcccctggcagtctgggcaacggagaccaagaaacatttttaggttgttttaaattcctttttttaaacttccagtttattgcgtaccaagagttgattacaacctccatgcttcataagcggacgccacgttagggttggacgtgggcaccacgagtcctttgaggctcctggacagagacccacatcaagatcggaagccctttgggtggcgttgcagatctcatttctcagtaggccgtgaagattttcatcctcatcacactctcagttggattttctggcactcttcctgcattgagtctcctgaattatgaacagagctccgtcatgtagcctgtt

SEQ ID NO: 929 - DNA, 2428 bp, Homo sapiens
  CDS (88)..(1689)
attttgtttctgtcaggctgtccctggccggggttctgtaacgcttgtgtgggccgcaggtggaggtgttgggaaagcgcggaggagatgttgtccccagtgtcccgagacgcgtctgatgctctgcagggacggaagtgcctgcgtccccgatcgagacgcctgccgctcccggcagctgtccgcgcccacggtcctatggcggagctaacggactccgcgcggggctgtgtggtctttgaggatgtgtttgtatacttctctcgggaagaatgggagcttcttgatgatgctcagagacttttgtaccatgatgtgatgctggagaactttgcacttttagcctcactgggaattgcattttccagatcacgtgcagtcatgaaactagagcgaggagaagagccctgggtgtatgaccaggtggatatgacttcagccacagaaagagaggcccagaggggacttagacctggttgttggcatggagtggaggatgaagaggtatcttctgagcagagcatttttgtagcaggagtgtcagaggtcaggactctcatggcagagctggagtctcacccatgtgacatatgtggcccaatattgaaagataccttacacctggctaaataccatgggggaaaagccaggcagaaaccatacttgtgtggggcatgtggaaagcaattctggttcagtacagactttgaccagcaccagaaccagcccaatggagggaaacttttcccaaggaaggagggcagagactctgtgaaaagctgcagagtccatgtgccagagaagaccctcacatgtgggaaaggtaggagagacttttcagccacatctggccttcttcagcatcaggcctctctcagcagcatgaagccccacaagagcactaagcttgtgagtggctttctcatgggacagaggtatcacaggtgtggtgaatgtgggaaagccttcacccgcaaagacacacttgctcggcatcagagaatccacactggagaaaggccttatgagtgtaacgaatgtgggaaattcttcagccaaagctatgacctctttaaacaccagacagttcacactggagaaaggccatacgagtgcagcgaatgtgggaaattctttagacaaatctccggcctgattgagcacaggcgagttcacacgggtgaaagactctatcagtgtggcaaatgtgggaaattttttagcagtaagtctaatctcattcgacaccaggaagttcacacaggagccaggccttatgtatgcagcgaatgtgggaaagagttcagtcggaaacacacacttgttctgcaccaacgaactcacactggagaaaggccttatgagtgcagtgaatgtgggaaggcctttagccaaagctcccaccttaatgtacactggagaattcacagcagtgattatgagtgtagcagatgtggtaaagctttcagctgcatctccaaactcattcagcaccagaaagttcactctggagaaaagccttatgagtgcagcaagtgcgggaaagccttcactcaaagacccaacctcatcaggcactggaaagtccacactggggaaaggccttatgtgtgtagtgagtgcgggagagaattcatccggaaacagacacttgttctgcaccagagggttcatgctggagaaaagctttaagagtgtagcaaatgtgggggaaagtcttaggccaatgcccccgacttactatatggtggggaactagcagtagttaatgagtgcagcagatgcaggaaagccttcccctggaggctgaaccttacccgccattgggaatttcacaccggacacaggccttagcagtctaagcaatgtgctgtctctgttcagcccaacagctcaccctagagtggaactctgggagcagccattgggagggaaccatcagtaagaagtgaaacttcatagatatggacattcccactggggagattccctgtgagtgtcaagtatgtgagatgctttcagcagctgtgttgcactttttaaatggctattggcctttgctggggcaggagccatctgctcctaccatctggcagaatcatactgcgtttaccatttaccccagcatgcttgtgacgggcagacctctcttctctccccagtccctaaaaggtgttgtgagtggtctcacagcccactaggggtcttaatttcctctcttttgatgtaaatggcatggaaataatcagctttgttcaagaggacacagaaggattctgcaaatagcctgcagagacttacctgtgttgattgatttcatatgatgctcgttatggatatatccaatatccaagtcacccagctctggaactgcctgcttcacattgctcatgataataaaggcctgttctttaagccaccatgtatt

SEQ ID NO: 930 - DNA, 2337 bp, Homo sapiens
  CDS (167)..(1564)
agggtcctagcacagtgtctgacggagctttcctaccagaccctgaaattcacgcatcaggcgcgggaagcggtatatcgatacagcaaatgctttggagcaagaaactaaactggggttacgacggtttgaagtttgtgacaacattgatcttgaaactattttgatggaatatgagagttattattttgtaaaatttcagaaataccccaaaattgtcaaaaagtcatcagacacagcagacaataatttaccgcaaagaagtagagggaagaccagaaggatgatgaacgacagttgtcaaaatcttcccaagatcaatcagcagaggccccggtccaaaaccacagcggggaagacaggggacaccaaatcgctcaataaggagcatcctaatcaggaggtagttgataacactcgcctggaaagtgccaacttcggcctacatatatcaagaatccgtaaagacagtggagaggaaaatgcccacccacgaagaggccaaatcattgacttccaagggctgctcacagatgccatcaagggagcaaccagtgaacttgccttgaacaccttcgaccataatccagacccctcagaacgactgctgaaacctctgagtgcatttattggcatgaacagtgagatgcgagaattggcagccgtggtgagccgggacatttatctccataatccaaacataaagtggaatgacattattggacttgatgcagccaagcagttagtcaaagaagctgttgtgtatcctataaggtatccacagctatttacaggaattctttctccctggaaaggactactgctgtacggccctccaggtacaggaaagactttactggccaaagctgtggccactgaatgtaaaacaaccttctttaacatttctgcatccaccattgtcagcaaatggagaggggattcagaaaaactcgttcgggtgttatttgagcttgcccgctaccacgccccatccacgatcttcctggacgagctggagtcggtgatgagtcagagaggcacagcttctgggggagaacatgaaggaagcctgcggatgaagacagagttactggtgcagatggatgggctggcacgctcagaagatctcgtatttgtcttagcagcttctaacctgccgtgggagctggactgtgccatgttacgccgcctggagaagaggattctggtcgatctccccagccgggaggccaggcaggccatgatctaccactggctgcctcctgtgagcaagagcagggccttggagctgcacacagagctggagtacagtgtgctgagccaggagactgagggctactcaggctcagatattaagctcgtctgcagggaagcagccatgcggcccgtgaggaagatctttgatgcacttgaaaatcaccagtcagaaagcagcgacttacccaggatccagttggatatagtaaccactgccgactttctggatgtgctaactcacaccaagccctccgcaaagaatctggctcagagatactcagactggcaaagagagttcgagtctgtctgaaaccacatttaccctgacctggccacaaaggcaaccacaaagacctcctagtttattaatgtccgtgggagaacaaaatgattggaatggaaaagagaaaattatttttgaagactggattaacttgagccactgtattgttttggatagctgagatatatttattaacttaccattatcgatgtcagcaaaatattgagagtttcagttacatacatatatgtgctattgggtcatacaatggagatttttctgacaattagactccataaaattttaatgaacaattttctgtaatgttactcatttgtaaactttttaagaaaaagatgtacttagaaaagttgtgttggccacacacaggatgaccctgagttggggcagccaagtagaagctaagcttgacaggcactgcccagctgacagtcccagggtgaaggaggacggaagcagggaaggcaatgcagtctgtttctcattccggacaatattctgaatctcatcagctccccctaattctgactccatccagctttgtcagcagcaacccctcccaaactaagccccactcagaaatgtcactgagcattcgatgctagagctaatagcagggttactaagaaccataccatcagctgcagtttgatgttttgggttctggccccatacatctttcacttttaaacctacatcggtgtgcctgccctttcttccatgcggagttccatcagtccaaggttaggtggggacctacatcgggaattcatccc

SEQ ID NO: 931 - DNA, 2394 bp, Homo sapiens
  CDS (347)..(2290)
cgccggttgaagcgtcgccactgagccgtcggaagaccgcccgaccataatttcaggatggcgccttgggctccagcgtctccccaacccctccatgccatgggtccccacgcagctgaggctggagtttggagtttgacccgcttggaggctctctcagcagcgggcatataggaggaagggtcactgctgtctccggaagctcttggctgcaaagagagaggatcccgggtatctccctccttacaaccaccgccacctcctagtgccttagaagccactgacagcccccagggcaggtgagccctgcatctggaataaggatccagaggtctcgttcaggaccatggagagcggcaccagcagccctcagcctccacagttagatcccctggatgcgtttccccagaagggcttggagcctggggacatcgcggtgctagttctgtacttcctctttgtcctggctgttggactatggtccacagtgaagaccaaaagagacacagtgaaaggctacttcctggctggaggggacatggtgtggtggccagtgggtgcatccttggttgccagcaatgttggaagtggacatttcattggcctgccagggtcaggtgctgctacgggcatttctgtatcagcttatgaacttaatggcttgttttctgtgctgatgttggcctggatcttcctacccatctacattgctggtcaggtcaccacgatgccagaatacctacggaagcgcttcggtggcatcagaatccccatcatcctggctgtactctacctatttatctacatcttcaccaagatctcggtagacatgtatgcaggtgccatcttcatccagcagtctttgcacctggatctgtacctggccatagttgggctactggccatcactgctgtatacacggttgctggtttcgccgcggttggtgggatggaaggactgaaggagaagtacttcttggccctggctagcaaccggagtgagaacagcagctgcgggctgccccgggaagatgccttccatattttccgagatccgctgacatctgatctcccgtggccgggggtcctatttggaatgtccatcccatccctctggtactggtgcacggatcaggtgattgtccagcggactctggctgccaagaacctgtcccatgccaaaggaggtgctctgatggctgcatacctgaaggtgctgcccctcttcataatggtgttccctgggatggtcagccgcatcctcttcccagatcaagtggcctgtgcagatccagagatctgccagaagatctgcagcaacccctcaggctgttcggacatcgcgtatcccaaactcgtgctggaactcctgcccacagggctccgtgggctgatgatggctgtgatggtggcggctctcatgtcctccctcacctccatctttaacagtgccagcaccatcttcaccatggacctctggaatcacctccggcctcgggcatctgagaaggagctcatgattgtgggcagggtgtttgtgctgctgctggtcctggtctccatcctctggatccctgtggtccaggccagccagggcggccagctcttcatctatatccagtccatcagctcctacctgcagccgcctgtggcggtggtcttcatcatgggatgtttctggaagaggaccaatgaaaagggtgccttctggggcctgatctcgggcctgctcctgggcttggttaggctggtcctggactttatttacgtgcagcctcgatgcgaccagccagatgagcgcccggtcctggtgaagagcattcactacctctacttctccatgatcctgtccacggtcaccctcatcactgtctccaccgtgagctggttcacagagccaccctccaaggagatggtcagccacctgacctggtttactcgtcacgaccccgtggtccagaaggaacaagcaccaccagcagctcccttgtctcttaccctctctcagaacgggatgccagaggccagcagcagcagcagcgtccagttcgagatggttcaagaaaacacgtctaaaacccacagctgtgacatgaccccaaagcagtccaaagtggtgaaggccatcctgtggctctgtggaatacaggagaagggcaaggaagagctcccggccagagcagaagccatcatagtttccctggaagaaaaccccttggtgaagaccctcctggacgtcaacctcattttctgcgtgagctgcgccatctttatctggggctattttgcttagtgtggggtgaacccaggggtccaaactctgtttctcttcagtgctccatttttttaatgaaagaaaaaataataaagcttttgtttaccaaaaaaaaaaaa

SEQ ID NO: 932 - DNA, 2475 bp, Homo sapiens
  CDS (347)..(2371)
cgccggttgaagcgtcgccactgagccgtcggaagaccgcccgaccataatttcaggatggcgccttgggctccagcgtctccccaacccctccatgccatgggtccccacgcagctgaggctggagtttggagtttgacccgcttggaggctctctcagcagcgggcatataggaggaagggtcactgctgtctccggaagctcttggctgcaaagagagaggatcccgggtatctccctccttacaaccaccgccacctcctagtgccttagaagccactgacagcccccagggcaggtgagccctgcatctggaataaggatccagaggtctcgttcaggaccatggagagcggcaccagcagccctcagcctccacagttagatcccctggatgcgtttccccagaagggcttggagcctggggacatcgcggtgctagttctgtacttcctctttgtcctggctgttggactatggtccacagtgaagaccaaaagagacacagtgaaaggctacttcctggctggaggggacatggtgtggtggccagtgggtgcatccttggttgccagcaatgttggaagtggacatttcattggcctgccagggtcaggtgctgctacgggcatttctgtatcagcttatgaacttaatggcttgttttctgtgctgatgttggcctggatcttcctacccatctacattgctggtcaggtcaccacgatgccagaatacctacggaagcgcttcggtggcatcagaatccccatcatcctggctgtactctacctatttatctacatcttcaccaagatctcggtagacatgtatgcaggtgccatcttcatccagcagtctttgcacctggatctgtacctggccatagttgggctactggccatcactgctgtatacacggttgctggtggcctggctgctgtgatctacacggatgccctgcagacgctgatcatgcttataggagcgctcaccttgatgggctacagtttcgccgcggttggtgggatggaaggactgaaggagaagtacttcttggccctggctagcaaccggagtgagaacagcagctgcgggctgccccgggaagatgccttccatattttccgagatccgctgacatctgatctcccgtggccgggggtcctatttggaatgtccatcccatccctctggtactggtgcacggatcaggtgattgtccagcggactctggctgccaagaacctgtcccatgccaaaggaggtgctctgatggctgcatacctgaaggtgctgcccctcttcataatggtgttccctgggatggtcagccgcatcctcttcccagatcaagtggcctgtgcagatccagagatctgccagaagatctgcagcaacccctcaggctgttcggacatcgcgtatcccaaactcgtgctggaactcctgcccacagggctccgtgggctgatgatggctgtgatggtggcggctctcatgtcctccctcacctccatctttaacagtgccagcaccatcttcaccatggacctctggaatcacctccggcctcgggcatctgagaaggagctcatgattgtgggcagggtgtttgtgctgctgctggtcctggtctccatcctctggatccctgtggtccaggccagccagggcggccagctcttcatctatatccagtccatcagctcctacctgcagccgcctgtggcggtggtcttcatcatgggatgtttctggaagaggaccaatgaaaagggtgccttctggggcctgatctcgggcctgctcctgggcttggttaggctggtcctggactttatttacgtgcagcctcgatgcgaccagccagatgagcgcccggtcctggtgaagagcattcactacctctacttctccatgatcctgtccacggtcaccctcatcactgtctccaccgtgagctggttcacagagccaccctccaaggagatggtcagccacctgacctggtttactcgtcacgaccccgtggtccagaaggaacaagcaccaccagcagctcccttgtctcttaccctctctcagaacgggatgccagaggccagcagcagcagcagcgtccagttcgagatggttcaagaaaacacgtctaaaacccacagctgtgacatgaccccaaagcagtccaaagtggtgaaggccatcctgtggctctgtggaatacaggagaagggcaaggaagagctcccggccagagcagaagccatcatagtttccctggaagaaaaccccttggtgaagaccctcctggacgtcaacctcattttctgcgtgagctgcgccatctttatctggggctattttgcttagtgtggggtgaacccaggggtccaaactctgtttctcttcagtgctccatttttttaatgaaagaaaaaataataaagcttttgtttaccaaaaaaaaaaaa

SEQ ID NO: 933 - DNA, 1757 bp, Homo sapiens
  CDS (68)..(1456)
ctggggtcggcggagacagctggtgtctgaagccgctcgcgcccagggtgaccctgtttgcagcacgatgtctgaagaagaggcggctcagatccccagatccagtgtgtgggagcaggaccagcagaacgtggtgcagcgtgtggtggctctgcccctggtcagggccacgtgcaccgcggtctgcgatgtttacagtgcagccaaggacaggcacccgctgctgggctccgcctgccgcctggctgagaactgcgtgtgcggcctgaccacccgtgccctggaccacgcccagccgctgctcgagcacctgcagccccagctggccactatgaacagcctcgcctgcaggggcctggacaagctggaagagaagcttccctttctccagcaaccttcggagacggtggtgacctcagccaaggacgtggtggccagcagtgtcacgggtgtggtggacctggcccggaggggccggcgctggagcgtggagctgaagcgctccgtgagccatgctgtggatgttgtactggaagaatcagaggagctggtggatcacttcctgcccatgacggaggaagagctcgcggcactggcggctgaggctgaaggccctgaagtgggttcggtggaggatcagaggagacagcagggctactttgtgcgcctcggctccctgtcagcacggatccgccacctggcctacgagcactctgtggggaaactgaggcagagcaaacaccgtgcccaggacaccctggcccagctgcaggagacgctggagctgatagaccacatgcagtgtggggtgacccccaccgccccggcccgccctgggaaggtgcacgagctgtggggggaatggggccagcgccctccggagagccgccgccggagccaggcagagctggagacgctggtgctgtcccgcagcctgacccaggagctgcagggcacggtagaggctctggagtccagcgtgcggggcctgcccgccggcgcccaggagaaggtggctgaggtgcggcgcagtgtggatgccctgcagaccgccttcgctgatgcccgctgcttcagggacgtgccagcggccgcgctggccgagggccggggtcgcgtggcccacgcgcacgcctgcgtggacgagctgctggagctggtggtgcaggccgtgccgctgccctggctggtgggacccttcgcgcccatccttgtggagcgacccgagcccctgcccgacctggcggacctggtggacgaggtcatcgggggccctgacccccgctgggcgcacctggactggccggcccagcagagagcctgggaggcagagcacagggacgggagtgggaatggggatggggacaggatgggtgttgccggggacatctgcgagcaggaacccgagacccccagctgcccggtcaagcacaccctgatgcccgagctggacttctgacccatgggccagtggaggcggggaggaaaggccacctgcacaccccgatccctgctgccccctggtggccacacgtaagctcgaggccttggccttgacccttctttggaatcaggcccaactccggatctctgaccacctttttggtattggactctcccattttttccttgaacacatggacaaagaggcccgggggagcagggcctcgaaccctattcaggccaacttgagccacaagctgggttcttcacctatgtcctgctccctggctccatgaagcgaatccaaatctttc

SEQ ID NO: 934 - DNA, 2339 bp, Homo sapiens
  CDS (96)..(1664)
gcgccggggccgggtagctgctcacaggcgcgcgagctaaccgagtgcggcgagggcctaccaggggcgacagggtttctctccgcaagcgcgcgatgcagcgggcggcggcgctggtccggcggggctgtggtccccggacccccagctcctggggccgcagccagagcagcgcggccgccgaggcctcggcggtgctcaaggtgcggcccgagcgcagccggcgcgagcgcatcctcacgctggagtccatgaacccgcaggtgaaggcggtggagtacgccgtgcggggacccatcgtgctcaaggccggcgagatcgagctcgagctgcagcggggtatcaaaaagccattcacagaggtcatccgagccaacatcggggacgcccaggctatggggcagcagccaatcaccttcctccggcaggtgatggcactatgcacctacccaaacctgctggacagccccagcttcccagaagatgctaagaaacgtgcccggcggatcctgcaggcttgtggcgggaacagcctggggtcctacagtgctagccagggtgtcaactgcatccgtgaagatgtggctgcctacatcaccaggagggatggcggtgtgcctgcggaccccgacaacatctacctgaccacgggagctagtgacggcatttctacgatcctgaagatcctcgtctccgggggcggcaagtcacggacaggtgtgatgatccccatcccacaatatcccctctattcagctgtcatctctgagctcgacgccatccaggtgaattactacctggacgaggagaactgctgggcgctgaatgtgaatgagctccggcgggcggtgcaggaggccaaagaccactgtgatcctaaggtgctctgcataatcaaccctgggaaccccacaggccaggtacaaagcagaaagtgcatagaagatgtgatccactttgcctgggaagagaagctctttctcctggctgatgaggtgtaccaggacaacgtgtactctccagattgcagattccactccttcaagaaggtgctgtacgagatggggcccgagtactccagcaacgtggagctcgcctccttccactccacctccaagggctacatgggcgagtgtggttacagaggaggctacatggaggtgatcaacctgcaccctgagatcaagggccagctggtgaagctgctgtcggtgcgcctgtgccccccagtgtctgggcaggccgccatggacattgtcgtgaaccccccggtggcaggagaggagtcctttgagcaattcagccgagagaaggagtcggtcctgggtaatctggccaaaaaagcaaagctgacggaagacctgtttaaccaagtcccaggaattcactgcaaccccttgcagggggccatgtacgccttccctcggatcttcattcctgccaaagctgtggaggctgctcaggcccatcaaatggctccagacatgttctactgcatgaagctcctggaggagactggcatctgtgtcgtgcccggcagtggctttgggcagagggaaggcacttaccacttcaggatgactatcctccctccagtggagaagctgaaaacggtgctgcagaaggtgaaagacttccacatcaacttcctggagaagtacgcgtgaggacgcctgagccccagcgggagacctgtccttggctcttcctcccaatgcccgtcaggctgaactcgcctcccccgtgactttgcctcgggcctcgcaaaggccgctggtcacttcgtcatcattttgcccctggagacgtctttctttgtgccttgatgttgagagcgcctctcttttgagcaaacaagcattctatatgcaaccagagtagaggggacctgctcagcaggtgtgaccagggttctctgaatctgttattgtttttgcttctggaaagttcatttggggtttacaacaactaggatgtgttgggtgagatgtttcagatctggagaaatgagcaggtgtcgggaaatgtgtgacttaaccgtggtgagggctggaaatccaaactcaccaccatgacctgtggcatcaggcttctcccagtacaggagggtgccatcccccagcatgcggcttctctgccattagcagccctgggcgggccgaccacactcgaggctgcggtgctacgggcttagccctcgcctccctcactgggagcttccccatcctccctgccttccccagtgggaagttagggaagctcaggagcctgggaccccgcatgtcccaaaatgggattggagaagctggagagaaagcagaagaggccgaggagtgagg

SEQ ID NO: 935 - DNA, 950 bp, Homo sapiens
  CDS (287)..(946)
ctgggccggggacaagcgtgtaggcttcaggtacagggcttcctaagtcaagggtttcaggtcgcactggagaatcattttgcaagcagatgtcataggtctcctcttagactggacggcacgcaaggtcagcgtcagcagatctgaccctaaaaataggcctctgttgccagtgggggtggctgggcgtgcggctgctacatgccccacggaccagaacctcccgacgcggccaggccccggcacacccagctgcagaaaggagagaaaatcccttggctctaaaatgacatctggagaagtgaagacaagcctcaagaatgcctactcatctgccaagaggctgtcgccgaagatggaggaggaaggggaggaggaggactactgcacccctggagcctttgagctggagcggctcttctggaagggcagtccccagtacacccacgtcaacgaggtctggcccaagctctacattggcgatgaggcgacggcgctggaccgctataggctgcagaaggcggggttcacgcacgtgctgaacgcggcccacggccgctggaacgtggacactgggcccgactactaccgcgacatggacatccagtaccacggcgtggaggccgacgacctgcccaccttcgacctcagtgtcttcttctacccggcggcagccttcatcgacagagcgctaagcgacgaccacagtaagatcctggttcactgcgtcatgggccgcagccggtcagccaccctggtcctggcctacctgatgatccacaaggacatgaccctggtggacgccatccagcaagtggccaagaaccgctgcgtcctcccgaaccggggctttttgaagcagctccgggagctggacaagcagctggtgcagcagaggcgacggtcccagcgccaggacggtgaggaggaggatggcagggagctgtagg

SEQ ID NO: 936 - DNA, 1328 bp, Homo sapiens
  CDS (194)..(1117)
ctggttcccagggaggctgggggtgattcaccacactcttaaaagaagactagcctcatttcctccccagctcatggggtaggattcctctgctctggcagcagatctcccagagggagcagcctgaccacatcactggcccagaagaggaggcgtctgtcccccagactagctgaaggaaaggctggcttggatgatgctctgctctctccttgcccttctcctgggcactttctttggggtcagatctcagactattcatcaatggccagcgaccctggtgcagcctgtgggcagcccgctctctctggagtgcactgtggagggaacatcaaaccccaacctatactggtaccgacaggctgcaggcaggggcctccagctgctcttctactccgttggtattggccagatcagctctgaggtgccccagaatctctcagcctccagaccccaggaccggcagttcatcctgagttctaagaagctcctcctcagtgactctggcttctatctctgtgcctggagtatagggggtggacgtgaaaaactgttttttggcagtggaacccagctctctgtcttggaggacctgaacaaggtgttcccacccgaggtcgctgtgtttgagccatcacaagcagagatctcccacacccaaaaggccacactggtgtgcctggccacaggcttcttccctgaccacgtggagctgagctggtgggtgaatgggaaggaggtgcacagtggggtcagcacggacccgcagcccctcaaggagcagcccgccctcaatgactccagatactgcctgagcagccgcctgagggtctcggccaccttctggcagaacccccgcaaccacttccgctgtcaagtccagttctacgggctctcggagaatgacgagtggacccaggatagggccaaacccgtcacccagatcgtcagcgccgaggcctggggtagagcagactgtggctttacctcggtgtcctaccagcaaggggtcctgtctgccaccatcctctatgagatcctgctagggaaggccaccctgtatgctgtgctggtcagcgcccttgtgttgatggccatggtcaagagaaaggatttctgaaggcagccctggaagtggagttaggagcttctaacccgtcatggtttcaatacacattcttcttttgccagcgcttctgaagagctgctctcacctctctgcatcccaatagatatccccctatgtgcatgcacacctgcacactcacgggtgaaatctccctaacccagggggaccttagcatgcctaagtgactaaacccataaaa

SEQ ID NO: 937 - DNA, 2313 bp, Homo sapiens
  CDS (101)..(1273)
tttcgtgaacccgctgcctggctggagctctctgggcccttcggtctcggcagcaacgcgttcccggcgacttctgacacagccattacctagattcaagatgaatagcgatcaagttacactggttggtcaagtgtttgagtcatatgtttcggaataccataagaatgatattcttctaatcttgaaggaaagggatgaagatgctcattacccagttgtggttaatgccatgactctgtttgagaccaacatggaaatcggggaatatttcaacatgttccccagtgaagtgcttacaatttttgatagtgcactgcgaaggtcagccttgacaattctccagtccctttctcagcctgaggctgtttccatgaaacagaatcttcatgccaggatatcaggtttgcctgtctgtcctgagctggtgagggaacacatacctaaaaccaaggatgtgggacactttttatctgtcactgggacagtgattcgaacaagtctggtgaaggttctggagtttgagcgggattacatgtgtaacaaatgcaagcatgtgtttgtgatcaaggctgactttgagcagtattacaccttttgccggccatcctcgtgtcccagcttggagagctgtgattcctctaaattcacttgcctctcaggcttgtcttcgtctccaaccaggtgtagagattaccaggaaatcaaaattcaggaacaggttcaaaggctatctgttggaagtattccacgatctatgaaggttattctggaagatgacttagtggatagttgcaaatctggtgatgacctcactatttacgggattgtaatgcaacggtggaagccctttcagcaagatgtgcgctgtgaagtggagatagtcctgaaagcaaattacatccaagtaaataatgagcagtcctcagggatcatcatggatgaggaggtccaaaaggaattcgaagatttttgggaatactataagagcgatccctttgcaggaaggaatgtaatattggctagcttgtgccctcaagtgtttggaatgtatctagtaaagcttgctgtggccatggtgctggctggtgggattcaaaggactgatgctacaggaacacgggtcagaggagaatctcatcttttattggttggggatcctggcacagggaaatctcagttcctcaaatatgcagcaaagattacaccaagatctgtgctgaccacaggaattggatctactagtgcaggtattgtatgtgacaatttcaagtaatttaacattacttcagaagttaacacaatggttttttctaatgaaaaactacctataataggataaatttcaagctaatttttgagttaccactaaaaatggaaggaaatatgcaatgttattttggtagctctaagaaaatatcttgcaagctccaccttcactttgcatcttagttttgaacaatcctattcaattttctcattctctagtgattaccttcatacttttatgcaggaaaaagtccgtatcatctggcattttatcaagactcagcaactggaatgttaaactaaagagggggatatttcactttaccaagtagatagatggtatagagcttaaggcattttcatgctcataaatctgataggcaacagtagctcctactgaaatttcttaggtagggaatgtttattaatatttggaaaatatacttccatcattgcaatgtggagcttcattcataagttgtaatgattctttagcaagtacacttaaaagcctttgcaggtagaatgtcaagatttgattataaataaagtgacccagggaatttagaaaaaaattattttaaaaaatatgtttgatgctattttgtatttttacagttttgattgggtaatgtttctgttcttctgaaaacagacccttggcttcacacattttaaaaatgtttgctacttgttaagggagtcagattaacttccattgggctaatgaatgctcaaatttctaatgagaaactaacactttaaaatttatcatacaacagaaaatggccaattaatggtcctgtataagtggaaaactgttaagggggtctcaggttttgaaatataactcaacagtatattaaccattgacaagaatggatttttggaattgagaagggtagacaaacttcaggatactaggcaagaatatataaagaatatttcccatgcgttttaaatccgtatgacccagtgttctagagttctgtataaaatgataccaacaacaaataaagatgcttcccaagtaaaaaaaaaaaa

SEQ ID NO: 938 - DNA, 1934 bp, Homo sapiens
  CDS (201)..(1874)
tttcgtgcggggggctgttcgggtggaggcgggggagccgccgggacaccaaaataggagctgcttgtggggtggagcggcactagctggcggcttccgagcgcctcttccaaagatggtcagaggggccggaggcgtccccgctcccgctcgctactagcccgcgggccagcgccgcgtcccgagccccggcgggagccatggctctaaaaggacaagaagattatatttatcttttcaaggattcaacacatccagtggattttctggatgcattcagaacattttacttggatggattatttactgatattactcttcagtgtccttcaggcataattttccattgtcaccgagccgttttagctgcttgcagcaattattttaaggcaatgttcacagctgacatgaaagaaaaatttaaaaataaaataaaactctctggcatccaccatgatattctggaaggccttgtaaattatgcatacacttcccaaattgaaataactaaaagaaatgttcaaagcctgcttgaggcagcggatctgctacagttcctttcagtaaagaaggcttgtgagcggtttttggtaaggcacttggatattgataattgtattggaatgcactcctttgcagaatttcatgtgtgtccagaactagagaaggaatctcgaagaattctatgttcaaagtttaaggaagtgtggcaacaagaagaatttctggaaatcagccttgaaaagtttctctttatcttgtccagaaagaatctcagtgtttggaaagaagaagctatcatagagccagttattaagtggactgctcatgatgtagaaaatcgaattgaatgcctctataatctactgagctatatcaacattgatatagatccagtgtacttaaaaacagccttaggccttcaaagaagctgcctgctcaccgaaaataagatccgctccctaatatacaatgccttgaatcccatgcataaagagatttcccagaggtccacagccacaatgtatataattggaggctattactggcatcctttatcagaggttcacatatgggatcctttgacaaatgtttggattcagggagcagaaataccagattataccagggagagctatggtgttacatgtttaggacccaacatttatgtaactgggggctacaggacggataacatagaagctcttgacacagtgtggatctataacagtgaaagtgatgaatggacagaaggtttgccaatgctcaatgccaggtattaccactgtgcagtcaccttgggtggctgtgtctatgctttaggtggttacagaaaaggggctccagcagaagaggctgagttctatgatcctttaaaagagaaatggattcctattgcaaacatgattaaaggtgtgggaaatgctactgcctgtgtcttacatgatgttatctacgtcattggtggccactgtggctacagaggaagctgcacctatgacaaagttcagagctacaattccgatatcaacgaatggagcctcatcacctccagtccacatccagaatatggattgtgctcagttccgtttgaaaataagctctatctagtcggtggacaaactacaatcacagaatgctatgaccctgaacaaaatgaatggagagagatagctcccatgatggaaaggaggatggagtgcggtgccgtcatcatgaatggatgtatttatgtcactggaggatactcctactcaaagggaacgtatcttcagagcattgagaaatatgatccagatcttaataagtgggaaatagtgggtaatttttccagtgccatgcgggctcatgggtgtgtttgtgtgtataaagcctaattgaatctgcagaaatgaccaagcaatcactttttttggagatagttttataaaaat

SEQ ID NO: 939 - DNA, 4646 bp, Homo sapiens
  CDS (10)..(4557)
gctgttggtatgggggccatcatcccgccccacctgcaaggccttcctggtgctaatggatcatcagtttctcaagtcagtgggggcagtgctgaaggaataagcaattctgtgtggggactgtccccaggtaaccctgccacaggaaatagcaattctgggttcagtcaggggaatggagacactgtgaactcagcattaagtgctaaacaaaatggatccagcagtgctgtgcaaaaggaaggaagtggaggaaatgcttgggattcaggacctcctgctggtcctggaatactcgcctggggaaggggcagtggcaacaatggcgttggtaatatccattcaggagcttggggccaccccagccgaagcacctctaacggtgtgaatggggaatggggaaagcccccaaaccagcattccaacagtgacatcaatgggaaaggatcaacagggtgggagagtcctagtgtcaccagccagaaccctaccgtacagcctggtggtgaacacatgaactcctgggccaaagcggcatcttctggaactacagcaagtgaaggaagtagtgatggttctggcaaccacaatgaaggaagcactgggagggaaggaacgggagaaggccgaaggcgagataaagggattatagaccaagggcacatccagttgccaaggaatgatcttgacccaagagttctgtctaatactggttggggacagactcctgtaaagcaaaacactgcctgggaatttgaagaatcccctaggtctgaaaggaaaaatgacaatgggacagaggcctggggttgtgcagctactcaggcttcaaactcaggggggaagaacgatgggtccatcatgaacagtacaaatacctcttcagtatctgggtgggtcaacgcgccacctgccgctgtgccagcaaacacaggttggggagacagcaacaacaaagcgccaagtggcccgggggtttggggggactcgataagctctactgctgttagtactgctgctgctgccaagagtggccatgcttggagtggggccgcaaatcaggaggacaagtcacccacctggggtgagcctccaaagcccaaatcccaacactggggagatggacaaagatcaaatccagcctggagtgcaggagggggagattgggcagattcatcgtctgtccttggacacttgggggatgggaaaaaaaatggatctggatgggatgctgacagtaataggtcagggtctggttggaatgacaccacgagatctgggaacagtggctggggcaacagcacaaatacaaaggccaatccaggtacaaactggggggagactttaaaacctggcccccaacagaactgggctagcaaaccccaagacaacaatgtgagtaactggggaggagctgcttctgtgaaacagacaggaacagggtggatcggggggccggtaccggtcaaacagaaggacagcagtgaagcaactggctgggaagaaccctctccaccgtccattcgccgcaaaatggaaattgatgatggtacctcagcttggggggacccaagcaactataacaataaaactgtaaacatgtgggatagaaacaacccggtcatccagagcagtaccacgaccaataccaccaccaccaccaccactaccacgagcaacaccacacacagggtcgagacgccgcccccgcaccaggccggtactcagctgaatcgatcaccgttgcttggtccaggtaggaaagtttcatcaggctggggagaaatgcctaatgttcactcaaagactgaaaactcttggggagaaccatcctccccttctaccctggtggataatggcacagcagcatgggggaagccacccagcagtggcagcgggtggggagatcaccctgccgagccgccggtggcatttggaagagctggcgcacctgttgctgcctcagccctgtgcaaaccagcttcaaaatctatgcaagaaggctggggcagtggtggggatgaaatgaacctcagtaccagccagtgggaggatgaagaaggggacgtgtggaataatgctgcttcccaagaaagcacctcctcctgcagctcctgggggaacgcccccaaaaaaggacttcaaaagggcatgaagacgtctggcaagcaggatgaggcctggatcatgagccggctgatcaaacaactcacagacatgggcttcccgagagagccagctgaggaggccttgaagagtaacaatatgaatcttgatcaggccatgagcgctctgctggaaaagaaggtggacgtggacaagcgtgggctgggagtgaccgaccataatggagtggccgccaagcccctcggctgccgcccgccaatctccaaagagtcttccgtggaccgccccacctttcttgacaaggatggcggcctcgtggaagagcccacgccttcaccgttcttgccttccccaagcctgaagctccccctttcacacagtgcactccccagtcaggccctgggtgggattgcctccgggctgggcatgcaaaacttgaattcttctagacagataccgagtggcaatctgggtatgtttggcaatagtggagcagcacaagccaggaccatgcagcagccgccacagccaccagtgcagcctcttaactcttcccagcccagtctccgtgctcaagtgcctcagtttctatcccctcaggttcaagcacagcttttgcagtttgcagcaaaaaacattggtctcaaccctgcactattaacctcgccaattaatcctcaacatatgacgatgttgaaccagctctatcagctgcagctggcataccaacgtttacaaatccagcagcagatgttacaggcccagcgtaatgtgtccggatccatgagacaacaggagcagcaagttgcgcgcacaatcactaatctgcagcagcagatccagcagcaccagcgccagctggcccaggccctgctcgtgaagcagccaccaccgccaccgcccccgccgcacctgtctctgcacccctctgcaggcaaatcggccatggacagcttcccctcgcacccacagactcccggcctacctgacctgcagaccaaagagcagcagtcttcacccaacacctttgctccttaccctctcgctggactgaacccaaacatgaatgtcaacagcatggacatgaccggtggcttgtcggtgaaggacccatcccagtcccagtcacgcctcccccagtggacgcaccccaactccatggataacttgcccagtgccgcttcccccctggagcagaaccctagcaagcatggtgctatccctggaggtctaagcattgggcctccaggtaagtcctccattgatgactcctatggccggtacgatttaatccagaacagtgagtcaccagccagtcctcccgtagctgttccccatagctggtcacgtgccaaatctgacagtgataaaatctcaaatggctctagcatcaactggcccccagaattccatccgggagttccatggaaaggactgcagaatattgaccctgagaatgaccctgacgtcactcctggcagtgtccccactgggcctaccatcaacaccaccatccaggatgtcaaccgctacctcctcaagagtggagggtcctccccgccatcatctcagaatgccacgctgccttcttcgagtgcctggccactcagtgcctccggctacagtagctctttcagcagcattgcatccgcacctagtgttgcaggtaaactgtcagacatcaaatcgacgtggtcctctggccctacctcccacacgcaagcctctctgtctcatgaactatggaaggtgcccagaaacagtactgcacccacgaggccacctccagggttaaccaatcccaagccctcctccacctggggtgccagccccctcggctggaccagctcctactcctcgggttctgcctggagcaccgacacctcaggaagaaccagcagctggctcgttcttcgaaacctcactccccagattgatggttctacactgcggacattgtgtttgcaacatgggcctcttatcacattccacctgaatctgactcaaggcaatgctgtggtccggtacagctccaaggaggaggctgccaaggcccagaagtctctgcacatgtgcgtcctgggaaacactaccatcctggccgagttcgctggtgaagaagaagtgaatcgcttcttagcccaaggccaggcgctgccacccacttccagctggcagtccagcagcgcgtccagccagccgcggctcagcgcagcgggcagctcccatggcctggtacgcagcgacgctggccactggaacgccccgtgcctgggtggcaaggggagcagtgagctgctgtggggcggggtgccccagtactccagcagcctgtggggcccgcccagcgccgacgacagcagggtgataggcagccccacgccgctaaccaccctgctgcctggggacctgctcagcggggagtccctgtaggctctgccatcatcagcaccaggagagccgacccctcccgggacccctcccggctgggcggccccacagacccgctggaacccagc

SEQ ID NO: 940 - DNA, 4529 bp, Homo sapiens
  CDS (10)..(4440)
gctgttggtatgggggccatcatcccgccccacctgcaaggccttcctggtgctaatggatcatcagtttctcaagtcagtgggggcagtgctgaaggaataagcaattctgtgtggggactgtccccaggtaaccctgccacaggaaatagcaattctgggttcagtcaggggaatggagacactgtgaactcagcattaagtgctaaacaaaatggatccagcagtgctgtgcaaaaggaaggaagtggaggaaatgcttgggattcaggacctcctgctggtcctggaatactcgcctggggaaggggcagtggcaacaatggcgttggtaatatccattcaggagcttggggccaccccagccgaagcacctctaacggtgtgaatggggaatggggaaagcccccaaaccagcattccaacagtgacatcaatgggaaaggatcaacagggtgggagagtcctagtgtcaccagccagaaccctaccgtacagcctggtggtgaacacatgaactcctgggccaaagcggcatcttctggaactacagcaagtgaaggaagtagtgatggttctggcaaccacaatgaaggaagcactgggagggaaggaacgggagaaggccgaaggcgagataaagggattatagaccaagggcacatccagttgccaaggaatgatcttgacccaagagttctgtctaatactggttggggacagactcctgtaaagcaaaacactgcctgggaatttgaagaatcccctaggtctgaaaggaaaaatgacaatgggacagaggcctggggttgtgcagctactcaggcttcaaactcaggggggaagaacgatgggtccatcatgaacagtacaaatacctcttcagtatctgggtgggtcaacgcgccacctgccgctgtgccagcaaacacaggttggggagacagcaacaacaaagcgccaagtggcccgggggtttggggggactcgataagctctactgctgttagtactgctgctgctgccaagagtggccatgcttggagtggggccgcaaatcaggaggacaagtcacccacctggggtgagcctccaaagcccaaatcccaacactggggagatggacaaagatcaaatccagcctggagtgcaggagggggagattgggcagattcatcgtctgtccttggacacttgggggatgggaaaaaaaatggatctggatgggatgctgacagtaataggtcagggtctggttggaatgacaccacgagatctgggaacagtggctggggcaacagcacaaatacaaaggccaatccaggtacaaactggggggagactttaaaacctggcccccaacagaactgggctagcaaaccccaagacaacaatgtgagtaactggggaggagctgcttctgtgaaacagacaggaacagggtggatcggggggccggtaccggtcaaacagaaggacagcagtgaagcaactggctgggaagaaccctctccaccgtccattcgccgcaaaatggaaattgatgatggtacctcagcttggggggacccaagcaactataacaataaaactgtaaacatgtgggatagaaacaacccggtcatccagagcagtaccacgaccaataccaccaccaccaccaccactaccacgagcaacaccacacacagggtcgagacgccgcccccgcaccaggccggtactcagctgaatcgatcaccgttgcttggtccaggtaggaaagtttcatcaggctggggagaaatgcctaatgttcactcaaagactgaaaactcttggggagaaccatcctccccttctaccctggtggataatggcacagcagcatgggggaagccacccagcagtggcagcgggtggggagatcaccctgccgagccgccggtggcatttggaagagctggcgcacctgttgctgcctcagccctgtgcaaaccagcttcaaaatctatgcaagaaggctggggcagtggtggggatgaaatgaacctcagtaccagccagtgggaggatgaagaaggggacgtgtggaataatgctgcttcccaagaaagcacctcctcctgcagctcctgggggaacgcccccaaaaaaggacttcaaaagggcatgaagacgtctggcaagcaggatgaggcctggatcatgagccggctgatcaaacaactcacagacatgggcttcccgagagagccagctgaggaggccttgaagagtaacaatatgaatcttgatcaggccatgagcgctctgctggaaaagaaggtggacgtggacaagcgtgggctgggagtgaccgaccataatggagtggccgccaagcccctcggctgccgcccgccaatctccaaagagtcttccgtggaccgccccacctttcttgacaaggatggcggcctcgtggaagagcccacgccttcaccgttcttgccttccccaagcctgaagctccccctttcacacagtgcactccccagtcaggccctgggtgggattgcctccgggctgggcatgcaaaacttgaattcttctagacagataccgagtggcaatctgggtatgtttggcaatagtggagcagcacaagccaggaccatgcagcagccgccacagccaccagtgcagcctcttaactcttcccagcccagtctccgtgctcaagtgcctcagtttctatcccctcaggttcaagcacagcttttgcagtttgcagcaaaaaacattggtctcaaccctgcactattaacctcgccaattaatcctcaacatatgacgatgttgaaccagctctatcagctgcagctggcataccaacgtttacaaatccagcagcagatgttacaggcccagcgtaatgtgtccggatccatgagacaacaggagcagcaagttgcgcgcacaatcactaatctgcagcagcagatccagcagcaccagcgccagctggcccaggccctgctcgtgaagcagccaccaccgccaccgcccccgccgcacctgtctctgcacccctctgcaggcaaatcggccatggacagcttcccctcgcacccacagactcccggcctacctgacctgcagaccaaagagcagcagtcttcacccaacacctttgctccttaccctctcgctggactgaacccaaacatgaatgtcaacagcatggacatgaccggtggcttgtcggtgaaggacccatcccagtcccagtcacgcctcccccagtggacgcaccccaactccatggataacttgcccagtgccgcttcccccctggagcagaaccctagcaagcatggtgctatccctggaggtctaagcattgggcctccaggtaagtcctccattgatgactcctatggccggtacgatttaatccagaacagtgagtcaccagccagtcctcccgtagctgttccccatagctggtcacgtgccaaatctgacagtgataaaatctcaaatggctctagcatcaactggcccccagaattccatccgggagttccatggaaaggactgcagaatattgaccctgagaatgaccctgacgtcactcctggcagtgtccccactgggcctaccatcaacaccaccatccaggatgtcaaccgctacctcctcaagagtggaggtaaactgtcagacatcaaatcgacgtggtcctctggccctacctcccacacgcaagcctctctgtctcatgaactatggaaggtgcccagaaacagtactgcacccacgaggccacctccagggttaaccaatcccaagccctcctccacctggggtgccagccccctcggctggaccagctcctactcctcgggttctgcctggagcaccgacacctcaggaagaaccagcagctggctcgttcttcgaaacctcactccccagattgatggttctacactgcggacattgtgtttgcaacatgggcctcttatcacattccacctgaatctgactcaaggcaatgctgtggtccggtacagctccaaggaggaggctgccaaggcccagaagtctctgcacatgtgcgtcctgggaaacactaccatcctggccgagttcgctggtgaagaagaagtgaatcgcttcttagcccaaggccaggcgctgccacccacttccagctggcagtccagcagcgcgtccagccagccgcggctcagcgcagcgggcagctcccatggcctggtacgcagcgacgctggccactggaacgccccgtgcctgggtggcaaggggagcagtgagctgctgtggggcggggtgccccagtactccagcagcctgtggggcccgcccagcgccgacgacagcagggtgataggcagccccacgccgctaaccaccctgctgcctggggacctgctcagcggggagtccctgtaggctctgccatcatcagcaccaggagagccgacccctcccgggacccctcccggctgggcggccccacagacccgctggaacccagc

SEQ ID NO: 941 - DNA, 4355 bp, Homo sapiens
  CDS (10)..(4266)
gctgttggtatgggggccatcatcccgccccacctgcaaggccttcctggtgctaatggatcatcagtttctcaagtcagtgggggcagtgctgaaggaataagcaattctgtgtggggactgtccccaggtaaccctgccacaggaaatagcaattctgggttcagtcaggggaatggagacactgtgaactcagcattaagtgctaaacaaaatggatccagcagtgctgtgcaaaaggaaggaagtggaggaaatgcttgggattcaggacctcctgctggtcctggaatactcgcctggggaaggggcagtggcaacaatggcgttggtaatatccattcaggagcttggggccaccccagccgaagcacctctaacggtgtgaatggggaatggggaaagcccccaaaccagcattccaacagtgacatcaatgggaaaggatcaacagggtgggagagtcctagtgtcaccagccagaaccctaccgtacagcctggtggtgaacacatgaactcctgggccaaagcggcatcttctggaactacagcaagtgaaggaagtagtgatggttctggcaaccacaatgaaggaagcactgggagggaaggaacgggagaaggccgaaggcgagataaagggattatagaccaagggcacatccagttgccaaggaatgatcttgacccaagagttctgtctaatactggttggggacagactcctgtaaagcaaaacactgcctgggaatttgaagaatcccctaggtctgaaaggaaaaatgacaatgggacagaggcctggggttgtgcagctactcaggcttcaaactcaggggggaagaacgatgggtccatcatgaacagtacaaatacctcttcagtatctgggtgggtcaacgcgccacctgccgctgtgccagcaaacacaggttggggagacagcaacaacaaagcgccaagtggcccgggggtttggggggactcgataagctctactgctgttagtactgctgctgctgccaagagtggccatgcttggagtggggccgcaaatcaggaggacaagtcacccacctggggtgagcctccaaagcccaaatcccaacactggggagatggacaaagatcaaatccagcctggagtgcaggagggggagattgggcagattcatcgtctgtccttggacacttgggggatgggaaaaaaaatggatctggatgggatgctgacagtaataggtcagggtctggttggaatgacaccacgagatctgggaacagtggctggggcaacagcacaaatacaaaggccaatccaggtacaaactggggggagactttaaaacctggcccccaacagaactgggctagcaaaccccaagacaacaatgtgagtaactggggaggagctgcttctgtgaaacagacaggaacagggtggatcggggggccggtaccggtcaaacagaaggacagcagtgaagcaactggctgggaagaaccctctccaccgtccattcgccgcaaaatggaaattgatgatggtacctcagcttggggggacccaagcaactataacaataaaactgtaaacatgtgggatagaaacaacccggtcatccagagcagtaccacgaccaataccaccaccaccaccaccactaccacgagcaacaccacacacagggtcgagacgccgcccccgcaccaggccggtactcagctgaatcgatcaccgttgcttggtccaggtaggaaagtttcatcaggctggggagaaatgcctaatgttcactcaaagactgaaaactcttggggagaaccatcctccccttctaccctggtggataatggcacagcagcatgggggaagccacccagcagtggcagcgggtggggagatcaccctgccgagccgccggtggcatttggaagagctggcgcacctgttgctgcctcagccctgtgcaaaccagcttcaaaatctatgcaagaaggctggggcagtggtggggatgaaatgaacctcagtaccagccagtgggaggatgaagaaggggacgtgtggaataatgctgcttcccaagaaagcacctcctcctgcagctcctgggggaacgcccccaaaaaaggacttcaaaagggcatgaagacgtctggcaagcaggatgaggcctggatcatgagccggctgatcaaacaactcacagacatgggcttcccgagagagccagctgaggaggccttgaagagtaacaatatgaatcttgatcaggccatgagcgctctgctggaaaagaaggtggacgtggacaagcgtgggctgggagtgaccgaccataatggagtggccgccaagcccctcggctgccgcccgccaatctccaaagagtcttccgtggaccgccccacctttcttgacaaggatggcggcctcgtggaagagcccacgccttcaccgttcttgccttccccaagcctgaagctccccctttcacacagtgcactccccagtcaggccctgggtgggattgcctccgggctgggcatgcaaaacttgaattcttctagacagataccgagtggcaatctgggtatgtttggcaatagtggagcagcacaagccaggaccatgcagcagccgccacagccaccagtgcagcctcttaactcttcccagcccagtctccgtgctcaagtgcctcagtttctatcccctcaggttcaagcacagcttttgcagtttgcagcaaaaaacattggtctcaaccctgcactattaacctcgccaattaatcctcaacatatgacgatgttgaaccagctctatcagctgcagctggcataccaacgtttacaaatccagcagcagatgttacaggcccagcgtaatgtgtccggatccatgagacaacaggagcagcaagttgcgcgcacaatcactaatctgcagcagcagatccagcagcaccagcgccagctggcccaggccctgctcgtgaagcagccaccaccgccaccgcccccgccgcacctgtctctgcacccctctgcaggcaaatcggccatggacagcttcccctcgcacccacagactcccggcctacctgacctgcagaccaaagagcagcagtcttcacccaacacctttgctccttaccctctcgctggactgaacccaaacatgaatgtcaacagcatggacatgaccggtggcttgtcggtgaaggacccatcccagtcccagtcacgcctcccccagtggacgcaccccaactccatggataacttgcccagtgccaaatctgacagtgataaaatctcaaatggctctagcatcaactggcccccagaattccatccgggagttccatggaaaggactgcagaatattgaccctgagaatgaccctgacgtcactcctggcagtgtccccactgggcctaccatcaacaccaccatccaggatgtcaaccgctacctcctcaagagtggaggtaaactgtcagacatcaaatcgacgtggtcctctggccctacctcccacacgcaagcctctctgtctcatgaactatggaaggtgcccagaaacagtactgcacccacgaggccacctccagggttaaccaatcccaagccctcctccacctggggtgccagccccctcggctggaccagctcctactcctcgggttctgcctggagcaccgacacctcaggaagaaccagcagctggctcgttcttcgaaacctcactccccagattgatggttctacactgcggacattgtgtttgcaacatgggcctcttatcacattccacctgaatctgactcaaggcaatgctgtggtccggtacagctccaaggaggaggctgccaaggcccagaagtctctgcacatgtgcgtcctgggaaacactaccatcctggccgagttcgctggtgaagaagaagtgaatcgcttcttagcccaaggccaggcgctgccacccacttccagctggcagtccagcagcgcgtccagccagccgcggctcagcgcagcgggcagctcccatggcctggtacgcagcgacgctggccactggaacgccccgtgcctgggtggcaaggggagcagtgagctgctgtggggcggggtgccccagtactccagcagcctgtggggcccgcccagcgccgacgacagcagggtgataggcagccccacgccgctaaccaccctgctgcctggggacctgctcagcggggagtccctgtaggctctgccatcatcagcaccaggagagccgacccctcccgggacccctcccggctgggcggccccacagacccgctggaacccagc

SEQ ID NO: 942 - DNA, 1937 bp, Homo sapiens
  CDS (188)..(1798)
aacgcaggcttccggatcatcctgggaaaaagctctaatcgttaaccccagagcgcggtggctaaaccgggctccggcgcctcccccagaagcccttttttaatcgttcatacggaccctggtcgacttcgccggagactgccagatctcgtgccttttccctgggggatcttcttaattataaataatgggggatgattataaaacaatttcttttgaagattctgaaccatccacaggaaggaattacacgccctccgtgcctccagaagcacaggaggagaccgttatgaatctcaaagggatagatgcgaatgaaccaaccgaaggaaggattcttttgaaaagcagtgaaaaaaagctacaagaaacaccaactgaagcaaatcacgtacaaagactgagacaaatgctggcttgccctccacatggtttactggacagggtcataacaaatgttaccatcattgttcttctgtgggctgtagtttggtcaattactggcagtgaatgtcttcctggaggaaacctatttggaattataatcctattctattgtgccatcattggtggtaaacttttggggcttattaagttacctacattgcctccactgccttctcttcttggcatgctgcttgcagggtttctcatcagaaatatcccagtcatcaacgataatgtgcagatcaagcacaagtggtcttcctctttgagaagcatagccctgtctatcattctggttcgtgctggccttggtctggattcaaaggccctgaagaagttaaagggcgtttgtgtaagactgtccatgggtccctgtattgtggaggcgtgcacatctgctcttcttgcccattacctgctgggtttaccatggcaatggggatttatactgggttttgttttaggtgctgtatctccagctgttgtggtgccttcaatgctccttttgcagggaggaggctatggtgttgagaagggtgtcccaaccttgctcatggcagctggcagcttcgatgacattctggccatcactggcttcaacacatgcttgggcatagccttttccacaggctctactgtctttaatgtcctcagaggagttttggaggtggtaattggtgtggcaactggatctgttcttggatttttcattcagtactttccaagccgtgaccaggacaaacttgtgtgtaagagaacattccttgtgttggggttgtctgtgctagctgtgttcagcagtgtgcattttggtttccctggatcaggaggactgtgcacgttggtcatggctttccttgcaggcatgggatggaccagcgaaaaggcagaggttgaaaagataattgcagttgcctgggacatttttcagccccttctttttggactaattggagcagaggtatctattgcatctctcagaccagaaactgtaggcctttgtgttgccaccgtaggcattgcagtattgatacgaattttgactacatttctgatggtgtgttttgctggttttaacttaaaagaaaagatatttatttcttttgcatggcttccaaaggccacagttcaggctgcaataggatctgtggctttggacacagcaaggtcacatggagagaaacaattagaagactatggaatggatgtgttgacagtggcatttttgtccatcctcatcacagccccaattggaagtctgcttattggtttactgggccccaggcttctgcagaaagttgaacatcaaaataaagatgaagaagttcaaggagagacttctgtgcaagtttagaggaagcgcggattctattactggaaactttgggactgaaaggccaaagcttctgggcccaccatcaacgcagctccgctttcatttctttcacatacaactttccacataagatttcatgcggaaaaaaaaaaaa

SEQ ID NO: 943 - DNA, 2270 bp, Homo sapiens
  CDS (369)..(1481)
gctaggtgaggcctggtgttaatcggccgaggcacttagtgcctgcccatgacgcttccctcgtgggctgccacctgggtcgggctgcggctgcctgtggctcgcgggccttccccgcgccggcgcggcccaaccgccaccgaaccttctggaagcggcggctgcctggtgccctcacgccgccatgaatctgtacgcccgcgctgagctctctgcagccttgtgctggcctggtgaggcggggctctggggtggtggccggcgcgggggcggtggtcggcgctggtggaggccgcgttcgattctgcccccgtgcgcgcaggccccgcctcaccagccccatcgctccacctctgccctccccctttatggcgcggccctgggctcattcattcctgcgccgtggcctgccagacacctgcgcccttctgcagccgcccgccgcatccgccgccgcagcccccagcatgtcgggcccagacgtcgagacgccgtccgccatccagatctgccggatcatgcggccagatgatgccaacgtggccggcaatgtccacggggggaccatcctgaagatgatcgaggaggcaggcgccatcatcagcacccggcattgcaacagccagaacggggagcgctgtgtggccgccctggctcgtgtcgagcgcaccgacttcctgtctcccatgtgcatcggtgaggtggcgcatgtcagcgcggagatcacctacacctccaagcactctgtggaggtgcaggtcaacgtgatgtccgaaaacatcctcacaggtgccaaaaagctgaccaataaggccaccctgtggtatgtgcccctgtcgctgaagaatgtggacaaggtcctcgaggtgcctcctgttgtgtattcccggcaggagcaggaggaggagggccggaagcggtatgaagcccagaagctggagcgcatggagaccaagtggaggaacggggacatcgtccagccagtcctcaacccagagccgaacactgtcagctacagccagtccagcttgatccacctggtggggccttcagactgcaccctgcacggctttgtgcacggaggtgtgaccatgaagctcatggatgaggtcgccgggatcgtggctgcacgccactgcaagaccaacatcgtcacagcttccgtggacgccattaattttcatgacaagatcagaaaaggctgcgtcatcaccatctcgggacgcatgaccttcacgagcaataagtccatggagatcgaggtgttggtggacgccgaccctgttgtggacagctctcagaagcgctaccgggccgccagtgccttcttcacctacgtgtcgctgagccaggaaggcaggtcgctgcctgtgccccagctggtgcccgagaccgaggacgagaagaagcgctttgaggaaggcaaagggcggtacctgcagatgaaggcgaagcgacagggccacgcggagcctcagccctagactccctcctcctgccactggtgcctcgagtagccatggcaacgggcccagtgtccagtcacttagaagttccccccttggccaaaaacccaattcacattgagagctggtgttgtctgaagttttcgtatcacagtgttaacctgtactctctcctgcaaacctacacaccaaagctttatttatatcattccagtatcaatgctacacagtgttgtcccgagcgccgggaggcgttgggcagaaaccctcgggaatgcttccgagcacgctgtagggtatgggaagaacccagcaccactaataaagctgctgcttggctggacccacgtgtcctgggtggtcatttgtcttgggggggctgctttcccagggggtgtgggacattggggctcccgtggacagtctcagccctcccagcaccagcacctgcatgtaccctagaacctcaggcacagcacaccgattggtgtccggctggtgacttgctggctatgaatgcccatttcccgtgggtccctggtttggtgtcctggccccagacaccctggctccctggacctcataggcagcccagatgctgggaggatgtgggctcagggccacgctgcctggtgggagtgccagcaccccacaacccccctgtctggcttgcagaggatgccggctctgagcctgtgtggctttcctatgaacagggtggggctgctgggaaagactcagcgaggtgatggtgtgggaagagcaaatgtggctggctcagcgtgttggagcccaccctgaccc

SEQ ID NO: 944 - DNA, 1299 bp, Homo sapiens
  CDS (14)..(979)
tttcgtcgaggcgatggcgccctgggcgctcctcagccctggggttctggtgcggaccgggcacaccgtgctgacctggggaatcacgctggtgctcttcctgcacgataccgataaaagtgcagatgaactgctggccacacacagccactcatggaaccaacatctccaggcctttgctcagccaggaacacacttccccacctccaactgcaccccaaccccacccactcctgttctacccggcccagcctcactgtgctctccggcctctccagagctgcggcaatgggaggagcagggggagctgctcctgcccctcaccttcctgctcctggtgctgggctccctgctgctctacctcgctgtgtcactcatggaccctggctacgtgaatgtgcagccccagcctcaggaggagctcaaagaggagcagacagccatggttcctccagccatccctcttcggcgctgcagatactgcctggtgctgcagcccctgagggctcggcactgccgtgagtgccgccgttgcgtccgccgctacgaccaccactgcccctggatggagaactgtgtgggagagcgcaaccacccactctttgtggtctacctggcgctgcagctggtggtgcttctgtggggcctgtacctggcatggtcaggcctccggttcttccagccctggggtctgtggttgcggtccagcgggctcctgttcgccaccttcctgctgctgtccctcttctcgttggtggccagcctgctcctcgtctcgcacctctacctggtggccagcaacaccaccacctgggaattcatctcctcacaccgcatcgcctatctccgccagcgccccagcaaccccttcgaccgaggcctgacccgcaacctggcccacttcttctgtggatggccctcagggtcctgggagaccctctgggctgaggaggaggaagagggcagcagcccagctgtttagggttgctggaggccgggctaccgtcttgtgcctgaaaaccacggggcctgtccccagctggggtgagcgctcagagggcctggggccctcactcctgcccacgcctcccagaccccagaacggagcttcaagtcagacagatccctgccttggtgggcagttctgccttccaaggaagaaggggaagaaaaggacctgtgggtggctcaggcccaagcagaccccgggctccaccccagccccgcccaggctgctgccagtgcacacttttacaaatttaatataaagcaagtccagtcttaaaaaaaaaaaaaaaa

SEQ ID NO: 945 - DNA, 1001 bp, Homo sapiens
  CDS (56)..(742)
ctctaccccttggagactgcttttctccagctctgtcaactcaacctttcccaccatgagtcggcaactgaacatcaagtccagtggtgacaagggcaacttcagtgtgcattcggcagtggtgccaaggaaggctgtgggtagcctggcttcttactgtgcagctggcagaggggctggcgctggctttggcagtcggagcctctatagccttggagggaatcggcgtatttctttcaatgtggctggtggcggcgttcgggctggaggttacggcttcaggcctggctctgggtatggagggggccgggccagtggctttgctggcagtatgtttggcagtgtggccctggggcctgcatgtttgtctgtgtgcccacctgggggcatccaccaggtcactgtcaacaagagcctcttggcccccctcaacgtggagctggaccctgagatccagaaggtgcgcgcccaggagcgggaacagatcaaggtgctgaacgacaagttcgcctccttcattgacaaggtacgcttcctggagcagcagaaccaggttctagaaaccaagtgggagctgctgcagcagctggacctgaacaactgcaagaagaacctggagcccatccttgagggctacatcagcaacctgcggaagcagctggagacactgtctggggacagggtgaggctggactcggagctgagaagcatgagggatctggtggaggactataagaagaggtgagcaggctccacccgagggtcacagaccatgtttcccgtgcctctgggctcacctgatctctgtgccattattttttaggagatgggggggtatgctccagggtcaggagctcacatccctttctctggctagggggaagggcctatcctctttgatgataacttcctgcctagttgacaggaagcagttcctgtgctccttgacccactgaaatgttcagttgctggtgtcgggagcccgctgtcgttgttctgag

SEQ ID NO: 946 - DNA, 1822 bp, Homo sapiens
  CDS (125)..(1612)
aaccgggggcgcggcggcggcgagggctcggcgggccattggctaccggccgcggcaaaggcagcttggggacccagcgtgcgcggggcccgcgggccgggccggggtgacctgggctgcagccatggaagaacagagggaggccctgaggaagatcatcaaaacactggctgtgaagaatgaagaaattcagagctttatctactccctgaaacagatgctgctgaacgtggaggcgaactcggcgaaggtgcaggaggacctcgaagcagagttccagtccctcttctccctcctggaggagctgaaagaaggcatgcttatgaagataaaacaggaccgtgccagccgcacctacgagctgcagaaccagctggctgcctgcacgcgggccctggagagctccgaggagcttctggagacagccaaccagactctgcaggccatggacagcgaggactttcctcaggctgccaagcaaatcaaagatggagtgaccatggcccctgccttccggctatcattgaaagcgaaggtcagtgacaacatgagtcacctcatggtggacttcgcgcaagagcggcagatgctacaggcactcaagttcctgcctgtgcccagcgcacccgtgatcgacctggctgagtccctggtggcagataactgtgtgaccctggtgtggcgcatgccggatgaggacagcaagattgaccactacgtgctggagtaccggcggaccaacttcgagggcccgccccgcctcaaggaggaccagccctggatggtcatcgagggcatccggcagacagagtacaccctgacaggtctcaagtttgacatgaaatacatgaacttccgtgtgaaggcctgtaacaaggcagttgcaggagagttctctgagccggtgactctggagacaccagcgttcatgttccgcctggatgcgtccacatcccaccagaacctgcgggtggatgatctctccgtggagtgggacgctatgggcgggaaggtgcaggatatcaaggctcgcgagaaagatggcaaggggcggacggcgtctcccatcaactccccagccagaggtactccatctcccaagaggatgccctcaggtcgtgggggacgggaccgcttcaccgctgagtcctacacagttctgggggacacgctgatcgacggcggggagcattactgggaggtgcgctacgagccggacagcaaggcgttcggcgtgggcgtggcctaccgcagcctgggccgcttcgagcaactgggcaagacggccgcctcctggtgcctgcacgtcaacaattggctgcaggtcagcttcacggccaagcacgccaacaaggtcaaggtgctggacgcccccgtgcccgactgcctgggtgtgcactgtgacttccaccaaggcctcctgtccttctacaatgcccgcaccaaacaagtgctgcacactttcaagaccaggttcacacagccgctgctgcctgctttcacggtatggtgtggcagcttccaggtgacgacaggcctgcaggtccccagtgctgtgcgctgcctgcaaaagcgaggcagtgctaccagcagctccaacaccagcctcacctaggcccccaggcacccacccagctggggtgtttttgggggagtcgccgccaagcccaggctgctggagccaggcaccctcctctgtcacttgctgcttggagccttaactccagatgggggggtcaccaagagggagtgggcaccctggcgggccctctccccacctcacctcttaataaaggtcagacactggcaaaaaaaaaaaaaa

SEQ ID NO: 947 - DNA, 3959 bp, Homo sapiens
  CDS (714)..(2183)
tactactactaagttcgcggccgtcggacgatggacagtccgaactccctgccgaggtacccttcaacttctacggagcttctcttctctccaaaggatccttctctaagggccgcctcctcatagacccgaactgtagtggccacagcccgcgcaccgcccggcacgcacctgcggtccggaagttctcccctgaccttaagttgcttaaggatgtaaagattagcgtgagctttaccgagagctgcaggagtaaggacaggaaggtgctgtacacaggagcagagcgcgacgtgcgggcggagtgcggtctgctccttagccctgtcagtggggacgtgcatgcttgtccctttggcgggagtgttggtgacggggtaggcatagggggtgagagtgctgataagaaggatgaggagaatgagctggatcaggaaaagagagtggagtatgcagtgctcgatgagttagaagattttactgacaatttggagctagatgaagaaggagcaggcgggttcacggctaaagcaatcgttcagagagacagagtggatgaagaggccttgaatttcccctacgaggatgactttgacaacgatgtggatgctctgctggaagaaggcctttgtgcccccaaaaagaggcgaacagaggaaaaatatggcggagacagcgaccatccgtccgatggagagacaagtgtgcagccgatgatgaccaagattaaaacagtgctcaaaagtcgtggccgcccacctacagagccgctgcccgacgggtggatcatgacattccataactctggagtcccggtgtacctacacagagagtctcgggtggtcacctggtccaggccatacttcttgggaacgggaagcatacggaaacacgaccctcctctgagtagcatcccttgtctgcattataagaaaatgaaggacaacgaggaacgggagcaaagcagtgacctcacccctagtggggatgtgtcccccgtcaagcccctgagccgatctgcagagctggagtttcccctggatgagcctgactctatgggtgctgacccggggcccccggacgagaaagacccactaggggctgaggcagcccctggggccctggggcaggtgaaggccaaagtcgaggtgtgcaaagatgaatccgttgatctcgaggaatttcgaagctacctggagaagcgttttgactttgagcaagttactgtgaaaaaattcaggacttgggctgagcggcggcaattcaatcgggaaatgaagcggaagcaggcggagtccgagaggcccatcttgccagccaatcagaagctcattactttatcagtgcaagatgcacccacaaagaaagagtttgttattaaccccaacgggaaatccgaggtctgcatcctgcacgagtacatgcagcgtgtcctcaaggtccgccctgtctataatttctttgaatgtgagaacccaagtgagccttttggtgcctcggtgaccattgatggtgtgacttacggatctggaactgcaagcagcaaaaaacttgcgaagaataaagctgcccgagctacactggaaatcctcatccctgactttgttaaacagacctctgaagagaagcccaaagacagtgaagaactcgagtattttaaccacatcagcatcgaggactcgcgggtctacgagctgaccagcaaggctgggctgttgtctccatatcagatcctccacgagtgccttaaaagaaaccatgggatgggtgacacgtctatcaagtttgaagtggttcctgggaaaaaccagaagagtgaatacgtcatggcgtgtggcaagcacacagtgcgcgggtggtgtaagaacaagagagttggaaagcagttagcctcacagaagatccttcagctgctgcacccacatgtcaagaactgggggtctttactgcgcatgtatggccgtgagagcagcaagatggtcaagcaggagacatcggacaagagtgtgattgagctgcagcagtatgccaagaagaacaagcccaacctgcacatcctcagcaagctccaagaggagatgaagaggctagctgaggaaagggaggagactcgaaagaagcccaagatgtccattgtggcgtccgcccagcctggcggtgagcccctgtgcaccgtggacgtgtgagggaggtggcacgggccagggcgcgggggccgccagccgcacttctgaggagaccagcagtcatgcatcgtgcaccacagtgtcaggcctccaacccacgctccttccctgtggccaacctgtgggcccggccttagggtggaggctttagtgtacagggacagccatggccacacagcacacatgtggagcagcggctctccctggaaagctccaggcctgaatggatggactcagcgactgcaccagtggcagctggtgactgtggacagtggtggaccctgcttctgtgcacctgctgcaggctctttttatgaaggctttcatgaattttagtatgtaatacgcactgacgacacatgatgcttggatgacagatgagaggggatggctgagtcctgtggctggcccgtgatgccaggtggcccatgtgcccagggcgcctgcagggctgctacagggacctggtcaggaggtgcacatggtgccctgccctcacccaccctctgtgtttccccttctttgaaaaggtagaagagaaaggaatattttaaacctttttggcttaaacagaattttagcatcagaactagctttctgggattggaggcaaaccatcaaggtggtccctctccagtctggacacgatgccagcaaggatgacgtcctgccacctcctggagttaccctggcctcctagggtccctttttctgatgaagtcttaattccctaaaagcgcctctttggacactgaggccctctctgcctttcctggcctccggcaacagttttttacaaagattttttgcagtcgagtccatatgtccacccattgatttttaaagcttttgtgatattttagcattttgaaagactttcacagtgagagtagaaggtagatttggaatcatgcattttagcaagtggacttgttgaaacaggaagcaagggccttcagtgtagcccattcttgatccagagctgttgcctgtgacagcggtttctctggatgtcaaaggcagctgcctggtgcccagcttgcttctcgactggtggcccctatgggtgggtgtgcgatggaaatgtgttcctgccggagtctgaggcaccagggtgtgctcaaaggctggccctggtggtggactggcacctgtgcagagtgccgtgtgcttgtggtgcgccatctgaagcaagagtccagcgttctgccgtgtctgtcccccaccatgccccctacaggcggtactgatggcgcttttttttttttttctgtcaggaaaacaatgttggcctgtgggccgcccacaacatatccttccctcactacctgtgtgaccaaggttggcttctgttgacctttaaaaaagaaaccctcaactcaaattgctataattagacacttgcttctgtcttgcctcctgtctgcagctgtgaatagtcatttgactgtgactgttgcccttagccagccagatgcgcctgtgaaccaaagcttcgtgcacatgtgttcccctaaaggttggggagcctcgctgtgtcttgctgttcccaggcaccaccacagcaggtgctgccatactcttgtggtctctgtgcgccccccccccccccacccgtctgccaagcatgggtatgaatcgtgcacacagccatgcttcaaggccggggcaggggagcctgtgctgatgccatccagggcactgggctgtgcctggaaggcgagccttgattgtctgaacacataaagcaaactgtccagaaaaaaaaaaaaa

SEQ ID NO: 948 - DNA, 1854 bp, Homo sapiens
  CDS (175)..(1083)
cccgggtcgacgatttcgtagcaccgcgagcacgccgtgctgccgctggacgaggcggtgcaggaggccaaggagctcttggagtccaggctgagggtcttgaagaaggaactggaggactgtgaggtgttccggtccacggaaaagaaggagagcaaggagctgctgaaacagatggcagcggagcaggagaaggtgggggcagagttccaggcactgagggctttcctggtggagcaggagggtcggctgctaggccgcctggaggaactgtcccgggaggtggcacagaagcagaatgagaacctggcccagctcggggttgagatcacccagctgtccaagctcagcagccagatccaggagacagctcaaaagcctgaccttgactttctccaggaattcaaaagcacgctgagcaggtgtagcaatgtgcctggccccaagccaaccacagtctcttctgagatgaagaataaagtctggaatgtttctctcaagacctttgtcttaaaagggatgctgaagaagttcaaagaggaccttcggggagagctggagaaagaggagaaagtggagctcaccttggatcccgacacggccaacccgcgcctcatcctctctctggatcttaagggcgtgcgcctcggcgagcgggcccaggacctgcccaaccacccctgccgcttcgacaccaacacccgcgtcctggcgtcctgcggcttctcctcgggccggcatcactgggaggtggaggtgggctctaaggacggctgggcctttggcgtggcccgcgagagcgtgcgccgaaagggcctgacgcccttcactcccgaggagggcgtctgggccctgcagctcaacggcggccagtactgggccgtgaccagccccgagcggtcgcccctcagctgcgggcacctgtcgcgcgtgcgggtggccctggacctggaggtgggagccgtgtccttctacgctgtggaggacatgcgccacctctacaccttccgcgtcaacttccaggagcgcgtgttcccgcttttctctgtttgctccacgggcacctacttgcgaatctggccttgaggggcactgctggggagctcctgtctctgggctgccggtgggaggggatgtcgcctccccagagatgcctggtccgtcttgggtctgccctccgtgctcctgacccctgctgcccaagagagcctgctacagacacaaccccgaggcaggagagtgactgtggccaaccgagcaggggaacaggggctttggactcctgagggtgttcccttcctgaggtcacatgtggatttggccagagccttcaggaggtggaggccggtgaggtcaggagcccagctctccagggggcttctgccctgactgggaagggtgcctggctccctaaaacaatgtcaaagccagtcctgctgttctctgttgccagggggcaggtctgggcctgggccaaccacgtttgttatcatggctgctgccttctggacagctgccagctctgccttgagaggttgtgggacctctggatccagctgacctgacaggtcatctactcagggaggagccctgtgctcccagctcagaggacagtctgggccagaactggaaggagacatctgtcccgtctttgagtgacaagcccgggacaacagccagtgggcatcacggctctccagcactccttagccggaggatacagagtgatgggtgcatcctgaccaatgcgacaaccaacacgtgctctcacaaacccctgactcccgcactttccagtgccaaagtacaaacgctgcttggataaggagagcaaagcttctggaactttattta

SEQ ID NO: 949 - protein, 187 aa, Homo sapiens
MWCASPVAVVAFCAGLLVSHPVLTQGQEAAGRRGADCEVCKEFLNRFYKSLIDRGVNFSLDTIEKELISFCLDTKGKENRLCYYLGATKDAATKILSEVTRPMSVHMPAMKICEKLKKLDSQICELKYEKTLDLASVDLRKMRVAELKQILHSWGEECRACAEKTDYVNLIQELAPKYAATHPKTEL

SEQ ID NO: 950 - protein, 234 aa, Homo sapiens
MGKWHVGGRRGSPRQWGATARGRDLEAVRRGGCGSVGRRRQRRRRRRRRMRRMRRMWATQGLAVRVALSVLPGSRALRPGDCEVCISYLGRFYQDLKDRDVTFSPATIENELIKFCREARGKENRLCYYIGATDDAATKIINEVSKPLAHHIPVEKICEKLKKKDSQICELKYDKQIDLSTVDLKKLRVKELKKILDDWGETCKGCAEKSDYIRKINELMPKYAPKAASAPTDL
